United States Patent Application Publication US 2026/0375177 A1 - sequence listing, part 2

SEQ ID NO: 10340 - DNA, 16 bp, synthetic construct
  misc_feature 1..16: note = Description of Artificial Sequence: Synthetic Antisense oligonucleotide
  modified_base 1..2: mod_base = OTHER; note = bicyclic nucleic acid (BNA)
  modified_base 15..16: mod_base = OTHER; note = bicyclic nucleic acid (BNA)
  modified_base 8: mod_base = OTHER; note = 5-methyl
  modified_base 12..13: mod_base = OTHER; note = 5-methyl
  source 1..16: mol_type = other DNA
gtaagttctgtccaag

SEQ ID NO: 10341 - DNA, 15 bp, synthetic construct
  misc_feature 1..15: note = Description of Artificial Sequence: Synthetic Antisense oligonucleotide
  modified_base 1..2: mod_base = OTHER; note = bicyclic nucleic acid (BNA)
  modified_base 14..15: mod_base = OTHER; note = bicyclic nucleic acid (BNA)
  modified_base 8: mod_base = OTHER; note = 5-methyl
  modified_base 12..13: mod_base = OTHER; note = 5-methyl
  source 1..15: mol_type = other DNA
gtaagttctgtccaa

SEQ ID NO: 10342 - DNA, 14 bp, synthetic construct
  misc_feature 1..14: note = Description of Artificial Sequence: Synthetic Antisense oligonucleotide
  modified_base 1..2: mod_base = OTHER; note = bicyclic nucleic acid (BNA)
  modified_base 13..14: mod_base = OTHER; note = bicyclic nucleic acid (BNA)
  modified_base 8: mod_base = OTHER; note = 5-methyl
  modified_base 12..13: mod_base = OTHER; note = 5-methyl
  source 1..14: mol_type = other DNA
gtaagttctgtcca

SEQ ID NO: 10343 - DNA, 13 bp, synthetic construct
  misc_feature 1..13: note = Description of Artificial Sequence: Synthetic Antisense oligonucleotide
  modified_base 1..2: mod_base = OTHER; note = bicyclic nucleic acid (BNA)
  modified_base 12..13: mod_base = OTHER; note = bicyclic nucleic acid (BNA)
  modified_base 8: mod_base = OTHER; note = 5-methyl
  modified_base 12..13: mod_base = OTHER; note = 5-methyl
  source 1..13: mol_type = other DNA
gtaagttctgtcc

SEQ ID NO: 10344 - DNA, 12 bp, synthetic construct
  misc_feature 1..12: note = Description of Artificial Sequence: Synthetic Antisense oligonucleotide
  modified_base 1..2: mod_base = OTHER; note = bicyclic nucleic acid (BNA)
  modified_base 11..12: mod_base = OTHER; note = bicyclic nucleic acid (BNA)
  modified_base 8: mod_base = OTHER; note = 5-methyl
  modified_base 12: mod_base = OTHER; note = 5-methyl
  source 1..12: mol_type = other DNA
gtaagttctgtc

SEQ ID NO: 10345 - DNA, 11 bp, synthetic construct
  misc_feature 1..11: note = Description of Artificial Sequence: Synthetic Antisense oligonucleotide
  modified_base 1..2: mod_base = OTHER; note = bicyclic nucleic acid (BNA)
  modified_base 10..11: mod_base = OTHER; note = bicyclic nucleic acid (BNA)
  modified_base 8: mod_base = OTHER; note = 5-methyl
  source 1..11: mol_type = other DNA
gtaagttctgt

SEQ ID NO: 10346 - DNA, 10 bp, synthetic construct
  misc_feature 1..10: note = Description of Artificial Sequence: Synthetic Antisense oligonucleotide
  modified_base 1..2: mod_base = OTHER; note = bicyclic nucleic acid (BNA)
  modified_base 9..10: mod_base = OTHER; note = bicyclic nucleic acid (BNA)
  modified_base 8: mod_base = OTHER; note = 5-methyl
  source 1..10: mol_type = other DNA
gtaagttctg

SEQ ID NO: 10347-10348 - skipped (2 entries)

SEQ ID NO: 10349 - DNA, 20 bp, synthetic construct
  misc_feature 1..20: note = Description of Artificial Sequence: Synthetic Antisense oligonucleotide
  modified_base 1..2: mod_base = OTHER; note = bicyclic nucleic acid (BNA)
  modified_base 19..20: mod_base = OTHER; note = bicyclic nucleic acid (BNA)
  modified_base 9: mod_base = OTHER; note = 5-methyl
  modified_base 13..14: mod_base = OTHER; note = 5-methyl
  modified_base 18..20: mod_base = OTHER; note = 5-methyl
  source 1..20: mol_type = other DNA
ggtaagttctgtccaagccc

SEQ ID NO: 10350 - DNA, 19 bp, synthetic construct
  misc_feature 1..19: note = Description of Artificial Sequence: Synthetic Antisense oligonucleotide
  modified_base 1..2: mod_base = OTHER; note = bicyclic nucleic acid (BNA)
  modified_base 18..19: mod_base = OTHER; note = bicyclic nucleic acid (BNA)
  modified_base 9: mod_base = OTHER; note = 5-methyl
  modified_base 13..14: mod_base = OTHER; note = 5-methyl
  modified_base 18..19: mod_base = OTHER; note = 5-methyl
  source 1..19: mol_type = other DNA
ggtaagttctgtccaagcc

SEQ ID NO: 10351 - DNA, 17 bp, synthetic construct
  misc_feature 1..17: note = Description of Artificial Sequence: Synthetic Antisense oligonucleotide
  modified_base 1..2: mod_base = OTHER; note = bicyclic nucleic acid (BNA)
  modified_base 16..17: mod_base = OTHER; note = bicyclic nucleic acid (BNA)
  modified_base 9: mod_base = OTHER; note = 5-methyl
  modified_base 13..14: mod_base = OTHER; note = 5-methyl
  source 1..17: mol_type = other DNA
ggtaagttctgtccaag

SEQ ID NO: 10352 - DNA, 16 bp, synthetic construct
  misc_feature 1..16: note = Description of Artificial Sequence: Synthetic Antisense oligonucleotide
  modified_base 1..2: mod_base = OTHER; note = bicyclic nucleic acid (BNA)
  modified_base 15..16: mod_base = OTHER; note = bicyclic nucleic acid (BNA)
  modified_base 9: mod_base = OTHER; note = 5-methyl
  modified_base 13..14: mod_base = OTHER; note = 5-methyl
  source 1..16: mol_type = other DNA
ggtaagttctgtccaa

SEQ ID NO: 10353 - DNA, 15 bp, synthetic construct
  misc_feature 1..15: note = Description of Artificial Sequence: Synthetic Antisense oligonucleotide
  modified_base 1..2: mod_base = OTHER; note = bicyclic nucleic acid (BNA)
  modified_base 14..15: mod_base = OTHER; note = bicyclic nucleic acid (BNA)
  modified_base 9: mod_base = OTHER; note = 5-methyl
  modified_base 13..14: mod_base = OTHER; note = 5-methyl
  source 1..15: mol_type = other DNA
ggtaagttctgtcca

SEQ ID NO: 10354 - DNA, 14 bp, synthetic construct
  misc_feature 1..14: note = Description of Artificial Sequence: Synthetic Antisense oligonucleotide
  modified_base 1..2: mod_base = OTHER; note = bicyclic nucleic acid (BNA)
  modified_base 13..14: mod_base = OTHER; note = bicyclic nucleic acid (BNA)
  modified_base 9: mod_base = OTHER; note = 5-methyl
  modified_base 13..14: mod_base = OTHER; note = 5-methyl
  source 1..14: mol_type = other DNA
ggtaagttctgtcc

SEQ ID NO: 10355 - DNA, 13 bp, synthetic construct
  misc_feature 1..13: note = Description of Artificial Sequence: Synthetic Antisense oligonucleotide
  modified_base 1..2: mod_base = OTHER; note = bicyclic nucleic acid (BNA)
  modified_base 12..13: mod_base = OTHER; note = bicyclic nucleic acid (BNA)
  modified_base 9: mod_base = OTHER; note = 5-methyl
  modified_base 13: mod_base = OTHER; note = 5-methyl
  source 1..13: mol_type = other DNA
ggtaagttctgtc

SEQ ID NO: 10356 - DNA, 12 bp, synthetic construct
  misc_feature 1..12: note = Description of Artificial Sequence: Synthetic Antisense oligonucleotide
  modified_base 1..2: mod_base = OTHER; note = bicyclic nucleic acid (BNA)
  modified_base 11..12: mod_base = OTHER; note = bicyclic nucleic acid (BNA)
  modified_base 9: mod_base = OTHER; note = 5-methyl
  source 1..12: mol_type = other DNA
ggtaagttctgt

SEQ ID NO: 10357 - DNA, 11 bp, synthetic construct
  misc_feature 1..11: note = Description of Artificial Sequence: Synthetic Antisense oligonucleotide
  modified_base 1..2: mod_base = OTHER; note = bicyclic nucleic acid (BNA)
  modified_base 10..11: mod_base = OTHER; note = bicyclic nucleic acid (BNA)
  modified_base 9: mod_base = OTHER; note = 5-methyl
  source 1..11: mol_type = other DNA
ggtaagttctg

SEQ ID NO: 10358 - DNA, 10 bp, synthetic construct
  misc_feature 1..10: note = Description of Artificial Sequence: Synthetic Antisense oligonucleotide
  modified_base 1..2: mod_base = OTHER; note = bicyclic nucleic acid (BNA)
  modified_base 9..10: mod_base = OTHER; note = bicyclic nucleic acid (BNA)
  modified_base 9: mod_base = OTHER; note = 5-methyl
  source 1..10: mol_type = other DNA
ggtaagttct

SEQ ID NO: 10359 - skipped

SEQ ID NO: 10360 - DNA, 20 bp, synthetic construct
  misc_feature 1..20: note = Description of Artificial Sequence: Synthetic Antisense oligonucleotide
  modified_base 1: mod_base = OTHER; note = 5-methyl
  modified_base 10: mod_base = OTHER; note = 5-methyl
  modified_base 14..15: mod_base = OTHER; note = 5-methyl
  modified_base 19..20: mod_base = OTHER; note = 5-methyl
  modified_base 1..2: mod_base = OTHER; note = bicyclic nucleic acid (BNA)
  modified_base 19..20: mod_base = OTHER; note = bicyclic nucleic acid (BNA)
  source 1..20: mol_type = other DNA
cggtaagttctgtccaagcc

SEQ ID NO: 10361 - DNA, 19 bp, synthetic construct
  misc_feature 1..19: note = Description of Artificial Sequence: Synthetic Antisense oligonucleotide
  modified_base 1: mod_base = OTHER; note = 5-methyl
  modified_base 10: mod_base = OTHER; note = 5-methyl
  modified_base 14..15: mod_base = OTHER; note = 5-methyl
  modified_base 19: mod_base = OTHER; note = 5-methyl
  modified_base 1..2: mod_base = OTHER; note = bicyclic nucleic acid (BNA)
  modified_base 18..19: mod_base = OTHER; note = bicyclic nucleic acid (BNA)
  source 1..19: mol_type = other DNA
cggtaagttctgtccaagc

SEQ ID NO: 10362 - DNA, 18 bp, synthetic construct
  misc_feature 1..18: note = Description of Artificial Sequence: Synthetic Antisense oligonucleotide
  modified_base 1: mod_base = OTHER; note = 5-methyl
  modified_base 10: mod_base = OTHER; note = 5-methyl
  modified_base 14..15: mod_base = OTHER; note = 5-methyl
  modified_base 1..2: mod_base = OTHER; note = bicyclic nucleic acid (BNA)
  modified_base 17..18: mod_base = OTHER; note = bicyclic nucleic acid (BNA)
  source 1..18: mol_type = other DNA
cggtaagttctgtccaag

SEQ ID NO: 10363 - DNA, 17 bp, synthetic construct
  misc_feature 1..17: note = Description of Artificial Sequence: Synthetic Antisense oligonucleotide
  modified_base 1: mod_base = OTHER; note = 5-methyl
  modified_base 10: mod_base = OTHER; note = 5-methyl
  modified_base 14..15: mod_base = OTHER; note = 5-methyl
  modified_base 1..2: mod_base = OTHER; note = bicyclic nucleic acid (BNA)
  modified_base 16..17: mod_base = OTHER; note = bicyclic nucleic acid (BNA)
  source 1..17: mol_type = other DNA
cggtaagttctgtccaa

SEQ ID NO: 10364 - DNA, 16 bp, synthetic construct
  misc_feature 1..16: note = Description of Artificial Sequence: Synthetic Antisense oligonucleotide
  modified_base 1: mod_base = OTHER; note = 5-methyl
  modified_base 10: mod_base = OTHER; note = 5-methyl
  modified_base 14..15: mod_base = OTHER; note = 5-methyl
  modified_base 1..2: mod_base = OTHER; note = bicyclic nucleic acid (BNA)
  modified_base 15..16: mod_base = OTHER; note = bicyclic nucleic acid (BNA)
  source 1..16: mol_type = other DNA
cggtaagttctgtcca

SEQ ID NO: 10365 - DNA, 15 bp, synthetic construct
  misc_feature 1..15: note = Description of Artificial Sequence: Synthetic Antisense oligonucleotide
  modified_base 1: mod_base = OTHER; note = 5-methyl
  modified_base 10: mod_base = OTHER; note = 5-methyl
  modified_base 14..15: mod_base = OTHER; note = 5-methyl
  modified_base 1..2: mod_base = OTHER; note = bicyclic nucleic acid (BNA)
  modified_base 14..15: mod_base = OTHER; note = bicyclic nucleic acid (BNA)
  source 1..15: mol_type = other DNA
cggtaagttctgtcc

SEQ ID NO: 10366 - DNA, 14 bp, synthetic construct
  misc_feature 1..14: note = Description of Artificial Sequence: Synthetic Antisense oligonucleotide
  modified_base 1: mod_base = OTHER; note = 5-methyl
  modified_base 10: mod_base = OTHER; note = 5-methyl
  modified_base 14: mod_base = OTHER; note = 5-methyl
  modified_base 1..2: mod_base = OTHER; note = bicyclic nucleic acid (BNA)
  modified_base 13..14: mod_base = OTHER; note = bicyclic nucleic acid (BNA)
  source 1..14: mol_type = other DNA
cggtaagttctgtc

SEQ ID NO: 10367 - DNA, 13 bp, synthetic construct
  misc_feature 1..13: note = Description of Artificial Sequence: Synthetic Antisense oligonucleotide
  modified_base 1: mod_base = OTHER; note = 5-methyl
  modified_base 10: mod_base = OTHER; note = 5-methyl
  modified_base 1..2: mod_base = OTHER; note = bicyclic nucleic acid (BNA)
  modified_base 12..13: mod_base = OTHER; note = bicyclic nucleic acid (BNA)
  source 1..13: mol_type = other DNA
cggtaagttctgt

SEQ ID NO: 10368 - DNA, 12 bp, synthetic construct
  misc_feature 1..12: note = Description of Artificial Sequence: Synthetic Antisense oligonucleotide
  modified_base 1: mod_base = OTHER; note = 5-methyl
  modified_base 10: mod_base = OTHER; note = 5-methyl
  modified_base 1..2: mod_base = OTHER; note = bicyclic nucleic acid (BNA)
  modified_base 11..12: mod_base = OTHER; note = bicyclic nucleic acid (BNA)
  source 1..12: mol_type = other DNA
cggtaagttctg

SEQ ID NO: 10369 - DNA, 11 bp, synthetic construct
  misc_feature 1..11: note = Description of Artificial Sequence: Synthetic Antisense oligonucleotide
  modified_base 1: mod_base = OTHER; note = 5-methyl
  modified_base 10: mod_base = OTHER; note = 5-methyl
  modified_base 1..2: mod_base = OTHER; note = bicyclic nucleic acid (BNA)
  modified_base 10..11: mod_base = OTHER; note = bicyclic nucleic acid (BNA)
  source 1..11: mol_type = other DNA
cggtaagttct

SEQ ID NO: 10370 - DNA, 10 bp, synthetic construct
  misc_feature 1..10: note = Description of Artificial Sequence: Synthetic Antisense oligonucleotide
  modified_base 1: mod_base = OTHER; note = 5-methyl
  modified_base 10: mod_base = OTHER; note = 5-methyl
  modified_base 1..2: mod_base = OTHER; note = bicyclic nucleic acid (BNA)
  modified_base 9..10: mod_base = OTHER; note = bicyclic nucleic acid (BNA)
  source 1..10: mol_type = other DNA
cggtaagttc

SEQ ID NO: 10371-10372 - skipped (2 entries)

SEQ ID NO: 10373 - DNA, 20 bp, synthetic construct
  misc_feature 1..20: note = Description of Artificial Sequence: Synthetic Antisense oligonucleotide
  modified_base 1..2: mod_base = OTHER; note = bicyclic nucleic acid (BNA)
  modified_base 19..20: mod_base = OTHER; note = bicyclic nucleic acid (BNA)
  modified_base 2: mod_base = OTHER; note = 5-methyl
  modified_base 11: mod_base = OTHER; note = 5-methyl
  modified_base 15..16: mod_base = OTHER; note = 5-methyl
  modified_base 20: mod_base = OTHER; note = 5-methyl
  source 1..20: mol_type = other DNA
tcggtaagttctgtccaagc

SEQ ID NO: 10374 - DNA, 19 bp, synthetic construct
  misc_feature 1..19: note = Description of Artificial Sequence: Synthetic Antisense oligonucleotide
  modified_base 1..2: mod_base = OTHER; note = bicyclic nucleic acid (BNA)
  modified_base 18..19: mod_base = OTHER; note = bicyclic nucleic acid (BNA)
  modified_base 2: mod_base = OTHER; note = 5-methyl
  modified_base 11: mod_base = OTHER; note = 5-methyl
  modified_base 15..16: mod_base = OTHER; note = 5-methyl
  source 1..19: mol_type = other DNA
tcggtaagttctgtccaag

SEQ ID NO: 10375 - DNA, 18 bp, synthetic construct
  misc_feature 1..18: note = Description of Artificial Sequence: Synthetic Antisense oligonucleotide
  modified_base 1..2: mod_base = OTHER; note = bicyclic nucleic acid (BNA)
  modified_base 17..18: mod_base = OTHER; note = bicyclic nucleic acid (BNA)
  modified_base 2: mod_base = OTHER; note = 5-methyl
  modified_base 11: mod_base = OTHER; note = 5-methyl
  modified_base 15..16: mod_base = OTHER; note = 5-methyl
  source 1..18: mol_type = other DNA
tcggtaagttctgtccaa

SEQ ID NO: 10376 - DNA, 17 bp, synthetic construct
  misc_feature 1..17: note = Description of Artificial Sequence: Synthetic Antisense oligonucleotide
  modified_base 1..2: mod_base = OTHER; note = bicyclic nucleic acid (BNA)
  modified_base 16..17: mod_base = OTHER; note = bicyclic nucleic acid (BNA)
  modified_base 2: mod_base = OTHER; note = 5-methyl
  modified_base 11: mod_base = OTHER; note = 5-methyl
  modified_base 15..16: mod_base = OTHER; note = 5-methyl
  source 1..17: mol_type = other DNA
tcggtaagttctgtcca

SEQ ID NO: 10377 - DNA, 16 bp, synthetic construct
  misc_feature 1..16: note = Description of Artificial Sequence: Synthetic Antisense oligonucleotide
  modified_base 1..2: mod_base = OTHER; note = bicyclic nucleic acid (BNA)
  modified_base 15..16: mod_base = OTHER; note = bicyclic nucleic acid (BNA)
  modified_base 2: mod_base = OTHER; note = 5-methyl
  modified_base 11: mod_base = OTHER; note = 5-methyl
  modified_base 15..16: mod_base = OTHER; note = 5-methyl
  source 1..16: mol_type = other DNA
tcggtaagttctgtcc

SEQ ID NO: 10378 - DNA, 15 bp, synthetic construct
  misc_feature 1..15: note = Description of Artificial Sequence: Synthetic Antisense oligonucleotide
  modified_base 1..2: mod_base = OTHER; note = bicyclic nucleic acid (BNA)
  modified_base 14..15: mod_base = OTHER; note = bicyclic nucleic acid (BNA)
  modified_base 2: mod_base = OTHER; note = 5-methyl
  modified_base 11: mod_base = OTHER; note = 5-methyl
  modified_base 15: mod_base = OTHER; note = 5-methyl
  source 1..15: mol_type = other DNA
tcggtaagttctgtc

SEQ ID NO: 10379 - DNA, 14 bp, synthetic construct
  misc_feature 1..14: note = Description of Artificial Sequence: Synthetic Antisense oligonucleotide
  modified_base 1..2: mod_base = OTHER; note = bicyclic nucleic acid (BNA)
  modified_base 13..14: mod_base = OTHER; note = bicyclic nucleic acid (BNA)
  modified_base 2: mod_base = OTHER; note = 5-methyl
  modified_base 11: mod_base = OTHER; note = 5-methyl
  source 1..14: mol_type = other DNA
tcggtaagttctgt

SEQ ID NO: 10380 - DNA, 13 bp, synthetic construct
  misc_feature 1..13: note = Description of Artificial Sequence: Synthetic Antisense oligonucleotide
  modified_base 1..2: mod_base = OTHER; note = bicyclic nucleic acid (BNA)
  modified_base 12..13: mod_base = OTHER; note = bicyclic nucleic acid (BNA)
  modified_base 2: mod_base = OTHER; note = 5-methyl
  modified_base 11: mod_base = OTHER; note = 5-methyl
  source 1..13: mol_type = other DNA
tcggtaagttctg

SEQ ID NO: 10381 - DNA, 12 bp, synthetic construct
  misc_feature 1..12: note = Description of Artificial Sequence: Synthetic Antisense oligonucleotide
  modified_base 1..2: mod_base = OTHER; note = bicyclic nucleic acid (BNA)
  modified_base 11..12: mod_base = OTHER; note = bicyclic nucleic acid (BNA)
  modified_base 2: mod_base = OTHER; note = 5-methyl
  modified_base 11: mod_base = OTHER; note = 5-methyl
  source 1..12: mol_type = other DNA
tcggtaagttct

SEQ ID NO: 10382 - DNA, 11 bp, synthetic construct
  misc_feature 1..11: note = Description of Artificial Sequence: Synthetic Antisense oligonucleotide
  modified_base 1..2: mod_base = OTHER; note = bicyclic nucleic acid (BNA)
  modified_base 10..11: mod_base = OTHER; note = bicyclic nucleic acid (BNA)
  modified_base 2: mod_base = OTHER; note = 5-methyl
  modified_base 11: mod_base = OTHER; note = 5-methyl
  source 1..11: mol_type = other DNA
tcggtaagttc

SEQ ID NO: 10383 - DNA, 10 bp, synthetic construct
  misc_feature 1..10: note = Description of Artificial Sequence: Synthetic Antisense oligonucleotide
  modified_base 1..2: mod_base = OTHER; note = bicyclic nucleic acid (BNA)
  modified_base 9..10: mod_base = OTHER; note = bicyclic nucleic acid (BNA)
  modified_base 2: mod_base = OTHER; note = 5-methyl
  source 1..10: mol_type = other DNA
tcggtaagtt

SEQ ID NO: 10384 - skipped

SEQ ID NO: 10385 - DNA, 20 bp, synthetic construct
  misc_feature 1..20: note = Description of Artificial Sequence: Synthetic Antisense oligonucleotide
  modified_base 1..2: mod_base = OTHER; note = bicyclic nucleic acid (BNA)
  modified_base 19..20: mod_base = OTHER; note = bicyclic nucleic acid (BNA)
  modified_base 3: mod_base = OTHER; note = 5-methyl
  modified_base 12: mod_base = OTHER; note = 5-methyl
  modified_base 16..17: mod_base = OTHER; note = 5-methyl
  source 1..20: mol_type = other DNA
gtcggtaagttctgtccaag

SEQ ID NO: 10386 - DNA, 19 bp, synthetic construct
  misc_feature 1..19: note = Description of Artificial Sequence: Synthetic Antisense oligonucleotide
  modified_base 1..2: mod_base = OTHER; note = bicyclic nucleic acid (BNA)
  modified_base 18..19: mod_base = OTHER; note = bicyclic nucleic acid (BNA)
  modified_base 3: mod_base = OTHER; note = 5-methyl
  modified_base 12: mod_base = OTHER; note = 5-methyl
  modified_base 16..17: mod_base = OTHER; note = 5-methyl
  source 1..19: mol_type = other DNA
gtcggtaagttctgtccaa

SEQ ID NO: 10387 - DNA, 18 bp, synthetic construct
  misc_feature 1..18: note = Description of Artificial Sequence: Synthetic Antisense oligonucleotide
  modified_base 1..2: mod_base = OTHER; note = bicyclic nucleic acid (BNA)
  modified_base 17..18: mod_base = OTHER; note = bicyclic nucleic acid (BNA)
  modified_base 3: mod_base = OTHER; note = 5-methyl
  modified_base 12: mod_base = OTHER; note = 5-methyl
  modified_base 16..17: mod_base = OTHER; note = 5-methyl
  source 1..18: mol_type = other DNA
gtcggtaagttctgtcca

SEQ ID NO: 10388 - DNA, 17 bp, synthetic construct
  misc_feature 1..17: note = Description of Artificial Sequence: Synthetic Antisense oligonucleotide
  modified_base 1..2: mod_base = OTHER; note = bicyclic nucleic acid (BNA)
  modified_base 16..17: mod_base = OTHER; note = bicyclic nucleic acid (BNA)
  modified_base 3: mod_base = OTHER; note = 5-methyl
  modified_base 12: mod_base = OTHER; note = 5-methyl
  modified_base 16..17: mod_base = OTHER; note = 5-methyl
  source 1..17: mol_type = other DNA
gtcggtaagttctgtcc

SEQ ID NO: 10389 - DNA, 16 bp, synthetic construct
  misc_feature 1..16: note = Description of Artificial Sequence: Synthetic Antisense oligonucleotide
  modified_base 1..2: mod_base = OTHER; note = bicyclic nucleic acid (BNA)
  modified_base 15..16: mod_base = OTHER; note = bicyclic nucleic acid (BNA)
  modified_base 3: mod_base = OTHER; note = 5-methyl
  modified_base 12: mod_base = OTHER; note = 5-methyl
  modified_base 16: mod_base = OTHER; note = 5-methyl
  source 1..16: mol_type = other DNA
gtcggtaagttctgtc

SEQ ID NO: 10390 - DNA, 15 bp, synthetic construct
  misc_feature 1..15: note = Description of Artificial Sequence: Synthetic Antisense oligonucleotide
  modified_base 1..2: mod_base = OTHER; note = bicyclic nucleic acid (BNA)
  modified_base 14..15: mod_base = OTHER; note = bicyclic nucleic acid (BNA)
  modified_base 3: mod_base = OTHER; note = 5-methyl
  modified_base 12: mod_base = OTHER; note = 5-methyl
  source 1..15: mol_type = other DNA
gtcggtaagttctgt

SEQ ID NO: 10391 - DNA, 14 bp, synthetic construct
  misc_feature 1..14: note = Description of Artificial Sequence: Synthetic Antisense oligonucleotide
  modified_base 1..2: mod_base = OTHER; note = bicyclic nucleic acid (BNA)
  modified_base 13..14: mod_base = OTHER; note = bicyclic nucleic acid (BNA)
  modified_base 3: mod_base = OTHER; note = 5-methyl
  modified_base 12: mod_base = OTHER; note = 5-methyl
  source 1..14: mol_type = other DNA
gtcggtaagttctg

SEQ ID NO: 10392 - DNA, 13 bp, synthetic construct
  misc_feature 1..13: note = Description of Artificial Sequence: Synthetic Antisense oligonucleotide
  modified_base 1..2: mod_base = OTHER; note = bicyclic nucleic acid (BNA)
  modified_base 12..13: mod_base = OTHER; note = bicyclic nucleic acid (BNA)
  modified_base 3: mod_base = OTHER; note = 5-methyl
  modified_base 12: mod_base = OTHER; note = 5-methyl
  source 1..13: mol_type = other DNA
gtcggtaagttct

SEQ ID NO: 10393 - DNA, 12 bp, synthetic construct
  misc_feature 1..12: note = Description of Artificial Sequence: Synthetic Antisense oligonucleotide
  modified_base 1..2: mod_base = OTHER; note = bicyclic nucleic acid (BNA)
  modified_base 11..12: mod_base = OTHER; note = bicyclic nucleic acid (BNA)
  modified_base 3: mod_base = OTHER; note = 5-methyl
  modified_base 12: mod_base = OTHER; note = 5-methyl
  source 1..12: mol_type = other DNA
gtcggtaagttc

SEQ ID NO: 10394 - DNA, 11 bp, synthetic construct
  misc_feature 1..11: note = Description of Artificial Sequence: Synthetic Antisense oligonucleotide
  modified_base 1..2: mod_base = OTHER; note = bicyclic nucleic acid (BNA)
  modified_base 10..11: mod_base = OTHER; note = bicyclic nucleic acid (BNA)
  modified_base 3: mod_base = OTHER; note = 5-methyl
  source 1..11: mol_type = other DNA
gtcggtaagtt

SEQ ID NO: 10395 - DNA, 10 bp, synthetic construct
  misc_feature 1..10: note = Description of Artificial Sequence: Synthetic Antisense oligonucleotide
  modified_base 1..2: mod_base = OTHER; note = bicyclic nucleic acid (BNA)
  modified_base 9..10: mod_base = OTHER; note = bicyclic nucleic acid (BNA)
  modified_base 3: mod_base = OTHER; note = 5-methyl
  source 1..10: mol_type = other DNA
gtcggtaagt

SEQ ID NO: 10396 - DNA, 20 bp, synthetic construct
  misc_feature 1..20: note = Description of Artificial Sequence: Synthetic Antisense oligonucleotide
  modified_base 1..2: mod_base = OTHER; note = bicyclic nucleic acid (BNA)
  modified_base 19..20: mod_base = OTHER; note = bicyclic nucleic acid (BNA)
  modified_base 4: mod_base = OTHER; note = 5-methyl
  modified_base 13: mod_base = OTHER; note = 5-methyl
  modified_base 17..18: mod_base = OTHER; note = 5-methyl
  source 1..20: mol_type = other DNA
agtcggtaagttctgtccaa

SEQ ID NO: 10397 - DNA, 19 bp, synthetic construct
  misc_feature 1..19: note = Description of Artificial Sequence: Synthetic Antisense oligonucleotide
  modified_base 1..2: mod_base = OTHER; note = bicyclic nucleic acid (BNA)
  modified_base 18..19: mod_base = OTHER; note = bicyclic nucleic acid (BNA)
  modified_base 4: mod_base = OTHER; note = 5-methyl
  modified_base 13: mod_base = OTHER; note = 5-methyl
  modified_base 17..18: mod_base = OTHER; note = 5-methyl
  source 1..19: mol_type = other DNA
agtcggtaagttctgtcca

SEQ ID NO: 10398 - DNA, 17 bp, synthetic construct
  misc_feature 1..17: note = Description of Artificial Sequence: Synthetic Antisense oligonucleotide
  modified_base 1..2: mod_base = OTHER; note = bicyclic nucleic acid (BNA)
  modified_base 16..17: mod_base = OTHER; note = bicyclic nucleic acid (BNA)
  modified_base 4: mod_base = OTHER; note = 5-methyl
  modified_base 13: mod_base = OTHER; note = 5-methyl
  modified_base 17: mod_base = OTHER; note = 5-methyl
  source 1..17: mol_type = other DNA
agtcggtaagttctgtc

SEQ ID NO: 10399 - DNA, 16 bp, synthetic construct
  misc_feature 1..16: note = Description of Artificial Sequence: Synthetic Antisense oligonucleotide
  modified_base 1..2: mod_base = OTHER; note = bicyclic nucleic acid (BNA)
  modified_base 15..16: mod_base = OTHER; note = bicyclic nucleic acid (BNA)
  modified_base 4: mod_base = OTHER; note = 5-methyl
  modified_base 13: mod_base = OTHER; note = 5-methyl
  source 1..16: mol_type = other DNA
agtcggtaagttctgt

SEQ ID NO: 10400 - DNA, 15 bp, synthetic construct
  misc_feature 1..15: note = Description of Artificial Sequence: Synthetic Antisense oligonucleotide
  modified_base 1..2: mod_base = OTHER; note = bicyclic nucleic acid (BNA)
  modified_base 14..15: mod_base = OTHER; note = bicyclic nucleic acid (BNA)
  modified_base 4: mod_base = OTHER; note = 5-methyl
  modified_base 13: mod_base = OTHER; note = 5-methyl
  source 1..15: mol_type = other DNA
agtcggtaagttctg

SEQ ID NO: 10401 - DNA, 14 bp, synthetic construct
  misc_feature 1..14: note = Description of Artificial Sequence: Synthetic Antisense oligonucleotide
  modified_base 1..2: mod_base = OTHER; note = bicyclic nucleic acid (BNA)
  modified_base 13..14: mod_base = OTHER; note = bicyclic nucleic acid (BNA)
  modified_base 4: mod_base = OTHER; note = 5-methyl
  modified_base 13: mod_base = OTHER; note = 5-methyl
  source 1..14: mol_type = other DNA
agtcggtaagttct

SEQ ID NO: 10402 - DNA, 13 bp, synthetic construct
  misc_feature 1..13: note = Description of Artificial Sequence: Synthetic Antisense oligonucleotide
  modified_base 1..2: mod_base = OTHER; note = bicyclic nucleic acid (BNA)
  modified_base 12..13: mod_base = OTHER; note = bicyclic nucleic acid (BNA)
  modified_base 4: mod_base = OTHER; note = 5-methyl
  modified_base 13: mod_base = OTHER; note = 5-methyl
  source 1..13: mol_type = other DNA
agtcggtaagttc

SEQ ID NO: 10403 - DNA, 12 bp, synthetic construct
  misc_feature 1..12: note = Description of Artificial Sequence: Synthetic Antisense oligonucleotide
  modified_base 1..2: mod_base = OTHER; note = bicyclic nucleic acid (BNA)
  modified_base 11..12: mod_base = OTHER; note = bicyclic nucleic acid (BNA)
  modified_base 4: mod_base = OTHER; note = 5-methyl
  source 1..12: mol_type = other DNA
agtcggtaagtt

SEQ ID NO: 10404 - DNA, 11 bp, synthetic construct
  misc_feature 1..11: note = Description of Artificial Sequence: Synthetic Antisense oligonucleotide
  modified_base 1..2: mod_base = OTHER; note = bicyclic nucleic acid (BNA)
  modified_base 10..11: mod_base = OTHER; note = bicyclic nucleic acid (BNA)
  modified_base 4: mod_base = OTHER; note = 5-methyl
  source 1..11: mol_type = other DNA
agtcggtaagt

SEQ ID NO: 10405 - DNA, 20 bp, synthetic construct
  misc_feature 1..20: note = Description of Artificial Sequence: Synthetic Antisense oligonucleotide
  modified_base 1: mod_base = OTHER; note = 5-methyl
  modified_base 5: mod_base = OTHER; note = 5-methyl
  modified_base 14: mod_base = OTHER; note = 5-methyl
  modified_base 18..19: mod_base = OTHER; note = 5-methyl
  modified_base 1..2: mod_base = OTHER; note = bicyclic nucleic acid (BNA)
  modified_base 19..20: mod_base = OTHER; note = bicyclic nucleic acid (BNA)
  source 1..20: mol_type = other DNA
cagtcggtaagttctgtcca

SEQ ID NO: 10406 - DNA, 19 bp, synthetic construct
  misc_feature 1..19: note = Description of Artificial Sequence: Synthetic Antisense oligonucleotide
  modified_base 1: mod_base = OTHER; note = 5-methyl
  modified_base 5: mod_base = OTHER; note = 5-methyl
  modified_base 14: mod_base = OTHER; note = 5-methyl
  modified_base 18..19: mod_base = OTHER; note = 5-methyl
  modified_base 1..2: mod_base = OTHER; note = bicyclic nucleic acid (BNA)
  modified_base 18..19: mod_base = OTHER; note = bicyclic nucleic acid (BNA)
  source 1..19: mol_type = other DNA
cagtcggtaagttctgtcc

SEQ ID NO: 10407 - DNA, 18 bp, synthetic construct
  misc_feature 1..18: note = Description of Artificial Sequence: Synthetic Antisense oligonucleotide
  modified_base 1: mod_base = OTHER; note = 5-methyl
  modified_base 5: mod_base = OTHER; note = 5-methyl
  modified_base 14: mod_base = OTHER; note = 5-methyl
  modified_base 18: mod_base = OTHER; note = 5-methyl
  modified_base 1..2: mod_base = OTHER; note = bicyclic nucleic acid (BNA)
  modified_base 17..18: mod_base = OTHER; note = bicyclic nucleic acid (BNA)
  source 1..18: mol_type = other DNA
cagtcggtaagttctgtc

SEQ ID NO: 10408 - DNA, 17 bp, synthetic construct
  misc_feature 1..17: note = Description of Artificial Sequence: Synthetic Antisense oligonucleotide
  modified_base 1: mod_base = OTHER; note = 5-methyl
  modified_base 5: mod_base = OTHER; note = 5-methyl
  modified_base 14: mod_base = OTHER; note = 5-methyl
  modified_base 1..2: mod_base = OTHER; note = bicyclic nucleic acid (BNA)
  modified_base 16..17: mod_base = OTHER; note = bicyclic nucleic acid (BNA)
  source 1..17: mol_type = other DNA
cagtcggtaagttctgt

SEQ ID NO: 10409 - DNA, 16 bp, synthetic construct
  misc_feature 1..16: note = Description of Artificial Sequence: Synthetic Antisense oligonucleotide
  modified_base 1: mod_base = OTHER; note = 5-methyl
  modified_base 5: mod_base = OTHER; note = 5-methyl
  modified_base 14: mod_base = OTHER; note = 5-methyl
  modified_base 1..2: mod_base = OTHER; note = bicyclic nucleic acid (BNA)
  modified_base 15..16: mod_base = OTHER; note = bicyclic nucleic acid (BNA)
  source 1..16: mol_type = other DNA
cagtcggtaagttctg

SEQ ID NO: 10410 - DNA, 15 bp, synthetic construct
  misc_feature 1..15: note = Description of Artificial Sequence: Synthetic Antisense oligonucleotide
  modified_base 1: mod_base = OTHER; note = 5-methyl
  modified_base 5: mod_base = OTHER; note = 5-methyl
  modified_base 14: mod_base = OTHER; note = 5-methyl
  modified_base 1..2: mod_base = OTHER; note = bicyclic nucleic acid (BNA)
  modified_base 14..15: mod_base = OTHER; note = bicyclic nucleic acid (BNA)
  source 1..15: mol_type = other DNA
cagtcggtaagttct

SEQ ID NO: 10411 - DNA, 14 bp, synthetic construct
  misc_feature 1..14: note = Description of Artificial Sequence: Synthetic Antisense oligonucleotide
  modified_base 1: mod_base = OTHER; note = 5-methyl
  modified_base 5: mod_base = OTHER; note = 5-methyl
  modified_base 14: mod_base = OTHER; note = 5-methyl
  modified_base 1..2: mod_base = OTHER; note = bicyclic nucleic acid (BNA)
  modified_base 13..14: mod_base = OTHER; note = bicyclic nucleic acid (BNA)
  source 1..14: mol_type = other DNA
cagtcggtaagttc

SEQ ID NO: 10412 - DNA, 13 bp, synthetic construct
  misc_feature 1..13: note = Description of Artificial Sequence: Synthetic Antisense oligonucleotide
  modified_base 1: mod_base = OTHER; note = 5-methyl
  modified_base 5: mod_base = OTHER; note = 5-methyl
  modified_base 1..2: mod_base = OTHER; note = bicyclic nucleic acid (BNA)
  modified_base 12..13: mod_base = OTHER; note = bicyclic nucleic acid (BNA)
  source 1..13: mol_type = other DNA
cagtcggtaagtt

SEQ ID NO: 10413 - DNA, 12 bp, synthetic construct
  misc_feature 1..12: note = Description of Artificial Sequence: Synthetic Antisense oligonucleotide
  modified_base 1: mod_base = OTHER; note = 5-methyl
  modified_base 5: mod_base = OTHER; note = 5-methyl
  modified_base 1..2: mod_base = OTHER; note = bicyclic nucleic acid (BNA)
  modified_base 11..12: mod_base = OTHER; note = bicyclic nucleic acid (BNA)
  source 1..12: mol_type = other DNA
cagtcggtaagt

SEQ ID NO: 10414 - DNA, 20 bp, synthetic construct
  misc_feature 1..20: note = Description of Artificial Sequence: Synthetic Antisense oligonucleotide
  modified_base 1..2: mod_base = OTHER; note = 5-methyl
  modified_base 6: mod_base = OTHER; note = 5-methyl
  modified_base 15: mod_base = OTHER; note = 5-methyl
  modified_base 19..20: mod_base = OTHER; note = 5-methyl
  modified_base 1..2: mod_base = OTHER; note = bicyclic nucleic acid (BNA)
  modified_base 19..20: mod_base = OTHER; note = bicyclic nucleic acid (BNA)
  source 1..20: mol_type = other DNA
ccagtcggtaagttctgtcc

SEQ ID NO: 10415 - DNA, 19 bp, synthetic construct
  misc_feature 1..19: note = Description of Artificial Sequence: Synthetic Antisense oligonucleotide
  modified_base 1..2: mod_base = OTHER; note = 5-methyl
  modified_base 6: mod_base = OTHER; note = 5-methyl
  modified_base 15: mod_base = OTHER; note = 5-methyl
  modified_base 19: mod_base = OTHER; note = 5-methyl
  modified_base 1..2: mod_base = OTHER; note = bicyclic nucleic acid (BNA)
  modified_base 18..19: mod_base = OTHER; note = bicyclic nucleic acid (BNA)
  source 1..19: mol_type = other DNA
ccagtcggtaagttctgtc

SEQ ID NO: 10416 - DNA, 18 bp, synthetic construct
  misc_feature 1..18: note = Description of Artificial Sequence: Synthetic Antisense oligonucleotide
  modified_base 1..2: mod_base = OTHER; note = 5-methyl
  modified_base 6: mod_base = OTHER; note = 5-methyl
  modified_base 15: mod_base = OTHER; note = 5-methyl
  modified_base 1..2: mod_base = OTHER; note = bicyclic nucleic acid (BNA)
  modified_base 17..18: mod_base = OTHER; note = bicyclic nucleic acid (BNA)
  source 1..18: mol_type = other DNA
ccagtcggtaagttctgt

SEQ ID NO: 10417 - DNA, 17 bp, synthetic construct
  misc_feature 1..17: note = Description of Artificial Sequence: Synthetic Antisense oligonucleotide
  modified_base 1..2: mod_base = OTHER; note = 5-methyl
  modified_base 6: mod_base = OTHER; note = 5-methyl
  modified_base 15: mod_base = OTHER; note = 5-methyl
  modified_base 1..2: mod_base = OTHER; note = bicyclic nucleic acid (BNA)
  modified_base 16..17: mod_base = OTHER; note = bicyclic nucleic acid (BNA)
  source 1..17: mol_type = other DNA
ccagtcggtaagttctg

SEQ ID NO: 10418 - DNA, 16 bp, synthetic construct
  misc_feature 1..16: note = Description of Artificial Sequence: Synthetic Antisense oligonucleotide
  modified_base 1..2: mod_base = OTHER; note = 5-methyl
  modified_base 6: mod_base = OTHER; note = 5-methyl
  modified_base 15: mod_base = OTHER; note = 5-methyl
  modified_base 1..2: mod_base = OTHER; note = bicyclic nucleic acid (BNA)
  modified_base 15..16: mod_base = OTHER; note = bicyclic nucleic acid (BNA)
  source 1..16: mol_type = other DNA
ccagtcggtaagttct

SEQ ID NO: 10419 - DNA, 15 bp, synthetic construct
  misc_feature 1..15: note = Description of Artificial Sequence: Synthetic Antisense oligonucleotide
  modified_base 1..2: mod_base = OTHER; note = 5-methyl
  modified_base 6: mod_base = OTHER; note = 5-methyl
  modified_base 15: mod_base = OTHER; note = 5-methyl
  modified_base 1..2: mod_base = OTHER; note = bicyclic nucleic acid (BNA)
  modified_base 14..15: mod_base = OTHER; note = bicyclic nucleic acid (BNA)
  source 1..15: mol_type = other DNA
ccagtcggtaagttc

SEQ ID NO: 10420 - DNA, 14 bp, synthetic construct
  misc_feature 1..14: note = Description of Artificial Sequence: Synthetic Antisense oligonucleotide
  modified_base 1..2: mod_base = OTHER; note = 5-methyl
  modified_base 6: mod_base = OTHER; note = 5-methyl
  modified_base 1..2: mod_base = OTHER; note = bicyclic nucleic acid (BNA)
  modified_base 13..14: mod_base = OTHER; note = bicyclic nucleic acid (BNA)
  source 1..14: mol_type = other DNA
ccagtcggtaagtt

SEQ ID NO: 10421 - DNA, 13 bp, synthetic construct
  misc_feature 1..13: note = Description of Artificial Sequence: Synthetic Antisense oligonucleotide
  modified_base 1..2: mod_base = OTHER; note = 5-methyl
  modified_base 6: mod_base = OTHER; note = 5-methyl
  modified_base 1..2: mod_base = OTHER; note = bicyclic nucleic acid (BNA)
  modified_base 12..13: mod_base = OTHER; note = bicyclic nucleic acid (BNA)
  source 1..13: mol_type = other DNA
ccagtcggtaagt

SEQ ID NO: 10422 - DNA, 20 bp, synthetic construct
  misc_feature 1..20: note = Description of Artificial Sequence: Synthetic Antisense oligonucleotide
  modified_base 1..2: mod_base = OTHER; note = bicyclic nucleic acid (BNA)
  modified_base 19..20: mod_base = OTHER; note = bicyclic nucleic acid (BNA)
  modified_base 2..3: mod_base = OTHER; note = 5-methyl
  modified_base 7: mod_base = OTHER; note = 5-methyl
  modified_base 16: mod_base = OTHER; note = 5-methyl
  modified_base 20: mod_base = OTHER; note = 5-methyl
  source 1..20: mol_type = other DNA
gccagtcggtaagttctgtc

SEQ ID NO: 10423 - DNA, 19 bp, synthetic construct
  misc_feature 1..19: note = Description of Artificial Sequence: Synthetic Antisense oligonucleotide
  modified_base 1..2: mod_base = OTHER; note = bicyclic nucleic acid (BNA)
  modified_base 18..19: mod_base = OTHER; note = bicyclic nucleic acid (BNA)
  modified_base 2..3: mod_base = OTHER; note = 5-methyl
  modified_base 7: mod_base = OTHER; note = 5-methyl
  modified_base 16: mod_base = OTHER; note = 5-methyl
  source 1..19: mol_type = other DNA
gccagtcggtaagttctgt

SEQ ID NO: 10424 - DNA, 18 bp, synthetic construct
  misc_feature 1..18: note = Description of Artificial Sequence: Synthetic Antisense oligonucleotide
  modified_base 1..2: mod_base = OTHER; note = bicyclic nucleic acid (BNA)
  modified_base 17..18: mod_base = OTHER; note = bicyclic nucleic acid (BNA)
  modified_base 2..3: mod_base = OTHER; note = 5-methyl
  modified_base 7: mod_base = OTHER; note = 5-methyl
  modified_base 16: mod_base = OTHER; note = 5-methyl
  source 1..18: mol_type = other DNA
gccagtcggtaagttctg

SEQ ID NO: 10425 - DNA, 17 bp, synthetic construct
  misc_feature 1..17: note = Description of Artificial Sequence: Synthetic Antisense oligonucleotide
  modified_base 1..2: mod_base = OTHER; note = bicyclic nucleic acid (BNA)
  modified_base 16..17: mod_base = OTHER; note = bicyclic nucleic acid (BNA)
  modified_base 2..3: mod_base = OTHER; note = 5-methyl
  modified_base 7: mod_base = OTHER; note = 5-methyl
  modified_base 16: mod_base = OTHER; note = 5-methyl
  source 1..17: mol_type = other DNA
gccagtcggtaagttct

SEQ ID NO: 10426 - DNA, 16 bp, synthetic construct
  misc_feature 1..16: note = Description of Artificial Sequence: Synthetic Antisense oligonucleotide
  modified_base 1..2: mod_base = OTHER; note = bicyclic nucleic acid (BNA)
  modified_base 15..16: mod_base = OTHER; note = bicyclic nucleic acid (BNA)
  modified_base 2..3: mod_base = OTHER; note = 5-methyl
  modified_base 7: mod_base = OTHER; note = 5-methyl
  modified_base 16: mod_base = OTHER; note = 5-methyl
  source 1..16: mol_type = other DNA
gccagtcggtaagttc

SEQ ID NO: 10427 - DNA, 15 bp, synthetic construct
  misc_feature 1..15: note = Description of Artificial Sequence: Synthetic Antisense oligonucleotide
  modified_base 1..2: mod_base = OTHER; note = bicyclic nucleic acid (BNA)
  modified_base 14..15: mod_base = OTHER; note = bicyclic nucleic acid (BNA)
  modified_base 2..3: mod_base = OTHER; note = 5-methyl
  modified_base 7: mod_base = OTHER; note = 5-methyl
  source 1..15: mol_type = other DNA
gccagtcggtaagtt

SEQ ID NO: 10428 - DNA, 14 bp, synthetic construct
  misc_feature 1..14: note = Description of Artificial Sequence: Synthetic Antisense oligonucleotide
  modified_base 1..2: mod_base = OTHER; note = bicyclic nucleic acid (BNA)
  modified_base 13..14: mod_base = OTHER; note = bicyclic nucleic acid (BNA)
  modified_base 2..3: mod_base = OTHER; note = 5-methyl
  modified_base 7: mod_base = OTHER; note = 5-methyl
  source 1..14: mol_type = other DNA
gccagtcggtaagt

SEQ ID NO: 10429 - DNA, 20 bp, synthetic construct
  misc_feature 1..20: note = Description of Artificial Sequence: Synthetic Antisense oligonucleotide
  modified_base 1..2: mod_base = OTHER; note = bicyclic nucleic acid (BNA)
  modified_base 19..20: mod_base = OTHER; note = bicyclic nucleic acid (BNA)
  modified_base 2: mod_base = OTHER; note = 5-methyl
  modified_base 14: mod_base = OTHER; note = 5-methyl
  modified_base 19: mod_base = OTHER; note = 5-methyl
  source 1..20: mol_type = other DNA
tcaaggaagatggcatttct

SEQ ID NO: 10430 - DNA, 22 bp, synthetic construct
  misc_feature 1..22: note = Description of Artificial Sequence: Synthetic Antisense oligonucleotide
  modified_base 1..2: mod_base = OTHER; note = bicyclic nucleic acid (BNA)
  modified_base 21..22: mod_base = OTHER; note = bicyclic nucleic acid (BNA)
  modified_base 2: mod_base = OTHER; note = 5-methyl
  modified_base 14: mod_base = OTHER; note = 5-methyl
  modified_base 19: mod_base = OTHER; note = 5-methyl
  source 1..22: mol_type = other DNA
tcaaggaagatggcatttctag

SEQ ID NO: 10431 - DNA, 16 bp, synthetic construct
  misc_feature 1..16: note = Description of Artificial Sequence: Synthetic Antisense oligonucleotide
  modified_base 1..2: mod_base = OTHER; note = bicyclic nucleic acid (BNA)
  modified_base 15..16: mod_base = OTHER; note = bicyclic nucleic acid (BNA)
  modified_base 2: mod_base = OTHER; note = 5-methyl
  modified_base 14: mod_base = OTHER; note = 5-methyl
  source 1..16: mol_type = other DNA
tcaaggaagatggcat

SEQ ID NO: 10432 - DNA, 15 bp, synthetic construct
  misc_feature 1..15: note = Description of Artificial Sequence: Synthetic Antisense oligonucleotide
  modified_base 1..2: mod_base = OTHER; note = bicyclic nucleic acid (BNA)
  modified_base 14..15: mod_base = OTHER; note = bicyclic nucleic acid (BNA)
  modified_base 9: mod_base = OTHER; note = 5-methyl
  modified_base 14: mod_base = OTHER; note = 5-methyl
  source 1..15: mol_type = other DNA
gaagatggcatttct

SEQ ID NO: 10433 - DNA, 21 bp, synthetic construct
  misc_feature 1..21: note = Description of Artificial Sequence: Synthetic Antisense oligonucleotide
  modified_base 1..2: mod_base = OTHER; note = bicyclic nucleic acid (BNA)
  modified_base 20..21: mod_base = OTHER; note = bicyclic nucleic acid (BNA)
  modified_base 2: mod_base = OTHER; note = 5-methyl
  modified_base 14: mod_base = OTHER; note = 5-methyl
  modified_base 19: mod_base = OTHER; note = 5-methyl
  source 1..21: mol_type = other DNA
tcaaggaagatggcatttcta

SEQ ID NO: 10434 - DNA, 19 bp, synthetic construct
  misc_feature 1..19: note = Description of Artificial Sequence: Synthetic Antisense oligonucleotide
  modified_base 1..2: mod_base = OTHER; note = bicyclic nucleic acid (BNA)
  modified_base 18..19: mod_base = OTHER; note = bicyclic nucleic acid (BNA)
  modified_base 2: mod_base = OTHER; note = 5-methyl
  modified_base 14: mod_base = OTHER; note = 5-methyl
  modified_base 19: mod_base = OTHER; note = 5-methyl
  source 1..19: mol_type = other DNA
tcaaggaagatggcatttc

SEQ ID NO: 10435 - DNA, 18 bp, synthetic construct
  misc_feature 1..18: note = Description of Artificial Sequence: Synthetic Antisense oligonucleotide
  modified_base 1..2: mod_base = OTHER; note = bicyclic nucleic acid (BNA)
  modified_base 17..18: mod_base = OTHER; note = bicyclic nucleic acid (BNA)
  modified_base 2: mod_base = OTHER; note = 5-methyl
  modified_base 14: mod_base = OTHER; note = 5-methyl
  source 1..18: mol_type = other DNA
tcaaggaagatggcattt

SEQ ID NO: 10436 - DNA, 17 bp, synthetic construct
  misc_feature 1..17: note = Description of Artificial Sequence: Synthetic Antisense oligonucleotide
  modified_base 1..2: mod_base = OTHER; note = bicyclic nucleic acid (BNA)
  modified_base 16..17: mod_base = OTHER; note = bicyclic nucleic acid (BNA)
  modified_base 2: mod_base = OTHER; note = 5-methyl
  modified_base 14: mod_base = OTHER; note = 5-methyl
  source 1..17: mol_type = other DNA
tcaaggaagatggcatt

SEQ ID NO: 10437 - DNA, 15 bp, synthetic construct
  misc_feature 1..15: note = Description of Artificial Sequence: Synthetic Antisense oligonucleotide
  modified_base 1..2: mod_base = OTHER; note = bicyclic nucleic acid (BNA)
  modified_base 14..15: mod_base = OTHER; note = bicyclic nucleic acid (BNA)
  modified_base 2: mod_base = OTHER; note = 5-methyl
  modified_base 14: mod_base = OTHER; note = 5-methyl
  source 1..15: mol_type = other DNA
tcaaggaagatggca

SEQ ID NO: 10438 - DNA, 14 bp, synthetic construct
  misc_feature 1..14: note = Description of Artificial Sequence: Synthetic Antisense oligonucleotide
  modified_base 1..2: mod_base = OTHER; note = bicyclic nucleic acid (BNA)
  modified_base 13..14: mod_base = OTHER; note = bicyclic nucleic acid (BNA)
  modified_base 2: mod_base = OTHER; note = 5-methyl
  modified_base 14: mod_base = OTHER; note = 5-methyl
  source 1..14: mol_type = other DNA
tcaaggaagatggc

SEQ ID NO: 10439 - DNA, 13 bp, synthetic construct
  misc_feature 1..13: note = Description of Artificial Sequence: Synthetic Antisense oligonucleotide
  modified_base 1..2: mod_base = OTHER; note = bicyclic nucleic acid (BNA)
  modified_base 12..13: mod_base = OTHER; note = bicyclic nucleic acid (BNA)
  modified_base 2: mod_base = OTHER; note = 5-methyl
  source 1..13: mol_type = other DNA
tcaaggaagatgg

SEQ ID NO: 10440 - DNA, 12 bp, synthetic construct
  misc_feature 1..12: note = Description of Artificial Sequence: Synthetic Antisense oligonucleotide
  modified_base 1..2: mod_base = OTHER; note = bicyclic nucleic acid (BNA)
  modified_base 11..12: mod_base = OTHER; note = bicyclic nucleic acid (BNA)
  modified_base 2: mod_base = OTHER; note = 5-methyl
  source 1..12: mol_type = other DNA
tcaaggaagatg

SEQ ID NO: 10441 - DNA, 11 bp, synthetic construct
  misc_feature 1..11: note = Description of Artificial Sequence: Synthetic Antisense oligonucleotide
  modified_base 1..2: mod_base = OTHER; note = bicyclic nucleic acid (BNA)
  modified_base 10..11: mod_base = OTHER; note = bicyclic nucleic acid (BNA)
  modified_base 2: mod_base = OTHER; note = 5-methyl
  source 1..11: mol_type = other DNA
tcaaggaagat

SEQ ID NO: 10442 - DNA, 10 bp, synthetic construct
  misc_feature 1..10: note = Description of Artificial Sequence: Synthetic Antisense oligonucleotide
  modified_base 1..2: mod_base = OTHER; note = bicyclic nucleic acid (BNA)
  modified_base 9..10: mod_base = OTHER; note = bicyclic nucleic acid (BNA)
  modified_base 2: mod_base = OTHER; note = 5-methyl
  source 1..10: mol_type = other DNA
tcaaggaaga

SEQ ID NO: 10443 - skipped

SEQ ID NO: 10444 - DNA, 21 bp, synthetic construct
  misc_feature 1..21: note = Description of Artificial Sequence: Synthetic Antisense oligonucleotide
  modified_base 1: mod_base = OTHER; note = 5-methyl
  modified_base 13: mod_base = OTHER; note = 5-methyl
  modified_base 18: mod_base = OTHER; note = 5-methyl
  modified_base 1..2: mod_base = OTHER; note = bicyclic nucleic acid (BNA)
  modified_base 20..21: mod_base = OTHER; note = bicyclic nucleic acid (BNA)
  source 1..21: mol_type = other DNA
caaggaagatggcatttctag

SEQ ID NO: 10445 - DNA, 20 bp, synthetic construct
  misc_feature 1..20: note = Description of Artificial Sequence: Synthetic Antisense oligonucleotide
  modified_base 1: mod_base = OTHER; note = 5-methyl
  modified_base 13: mod_base = OTHER; note = 5-methyl
  modified_base 18: mod_base = OTHER; note = 5-methyl
  modified_base 1..2: mod_base = OTHER; note = bicyclic nucleic acid (BNA)
  modified_base 19..20: mod_base = OTHER; note = bicyclic nucleic acid (BNA)
  source 1..20: mol_type = other DNA
caaggaagatggcatttcta

SEQ ID NO: 10446 - DNA, 19 bp, synthetic construct
  misc_feature 1..19: note = Description of Artificial Sequence: Synthetic Antisense oligonucleotide
  modified_base 1: mod_base = OTHER; note = 5-methyl
  modified_base 13: mod_base = OTHER; note = 5-methyl
  modified_base 18: mod_base = OTHER; note = 5-methyl
  modified_base 1..2: mod_base = OTHER; note = bicyclic nucleic acid (BNA)
  modified_base 18..19: mod_base = OTHER; note = bicyclic nucleic acid (BNA)
  source 1..19: mol_type = other DNA
caaggaagatggcatttct

SEQ ID NO: 10447 - DNA, 18 bp, synthetic construct
  misc_feature 1..18: note = Description of Artificial Sequence: Synthetic Antisense oligonucleotide
  modified_base 1: mod_base = OTHER; note = 5-methyl
  modified_base 13: mod_base = OTHER; note = 5-methyl
  modified_base 18: mod_base = OTHER; note = 5-methyl
  modified_base 1..2: mod_base = OTHER; note = bicyclic nucleic acid (BNA)
  modified_base 17..18: mod_base = OTHER; note = bicyclic nucleic acid (BNA)
  source 1..18: mol_type = other DNA
caaggaagatggcatttc

SEQ ID NO: 10448 - DNA, 17 bp, synthetic construct
  misc_feature 1..17: note = Description of Artificial Sequence: Synthetic Antisense oligonucleotide
  modified_base 1: mod_base = OTHER; note = 5-methyl
  modified_base 13: mod_base = OTHER; note = 5-methyl
  modified_base 1..2: mod_base = OTHER; note = bicyclic nucleic acid (BNA)
  modified_base 16..17: mod_base = OTHER; note = bicyclic nucleic acid (BNA)
  source 1..17: mol_type = other DNA
caaggaagatggcattt

SEQ ID NO: 10449 - DNA, 16 bp, synthetic construct
  misc_feature 1..16: note = Description of Artificial Sequence: Synthetic Antisense oligonucleotide
  modified_base 1: mod_base = OTHER; note = 5-methyl
  modified_base 13: mod_base = OTHER; note = 5-methyl
  modified_base 1..2: mod_base = OTHER; note = bicyclic nucleic acid (BNA)
  modified_base 15..16: mod_base = OTHER; note = bicyclic nucleic acid (BNA)
  source 1..16: mol_type = other DNA
caaggaagatggcatt

SEQ ID NO: 10450 - DNA, 15 bp, synthetic construct
  misc_feature 1..15: note = Description of Artificial Sequence: Synthetic Antisense oligonucleotide
  modified_base 1: mod_base = OTHER; note = 5-methyl
  modified_base 13: mod_base = OTHER; note = 5-methyl
  modified_base 1..2: mod_base = OTHER; note = bicyclic nucleic acid (BNA)
  modified_base 14..15: mod_base = OTHER; note = bicyclic nucleic acid (BNA)
  source 1..15: mol_type = other DNA
caaggaagatggcat

SEQ ID NO: 10451 - DNA, 14 bp, synthetic construct
  misc_feature 1..14: note = Description of Artificial Sequence: Synthetic Antisense oligonucleotide
  modified_base 1: mod_base = OTHER; note = 5-methyl
  modified_base 13: mod_base = OTHER; note = 5-methyl
  modified_base 1..2: mod_base = OTHER; note = bicyclic nucleic acid (BNA)
  modified_base 13..14: mod_base = OTHER; note = bicyclic nucleic acid (BNA)
  source 1..14: mol_type = other DNA
caaggaagatggca

SEQ ID NO: 10452 - DNA, 13 bp, synthetic construct
  misc_feature 1..13: note = Description of Artificial Sequence: Synthetic Antisense oligonucleotide
  modified_base 1: mod_base = OTHER; note = 5-methyl
  modified_base 13: mod_base = OTHER; note = 5-methyl
  modified_base 1..2: mod_base = OTHER; note = bicyclic nucleic acid (BNA)
  modified_base 12..13: mod_base = OTHER; note = bicyclic nucleic acid (BNA)
  source 1..13: mol_type = other DNA
caaggaagatggc

SEQ ID NO: 10453 - DNA, 12 bp, synthetic construct
  misc_feature 1..12: note = Description of Artificial Sequence: Synthetic Antisense oligonucleotide
  modified_base 1: mod_base = OTHER; note = 5-methyl
  modified_base 1..2: mod_base = OTHER; note = bicyclic nucleic acid (BNA)
  modified_base 11..12: mod_base = OTHER; note = bicyclic nucleic acid (BNA)
  source 1..12: mol_type = other DNA
caaggaagatgg

SEQ ID NO: 10454 - DNA, 11 bp, synthetic construct
  misc_feature 1..11: note = Description of Artificial Sequence: Synthetic Antisense oligonucleotide
  modified_base 1: mod_base = OTHER; note = 5-methyl
  modified_base 1..2: mod_base = OTHER; note = bicyclic nucleic acid (BNA)
  modified_base 10..11: mod_base = OTHER; note = bicyclic nucleic acid (BNA)
  source 1..11: mol_type = other DNA
caaggaagatg

SEQ ID NO: 10455 - DNA, 10 bp, synthetic construct
  misc_feature 1..10: note = Description of Artificial Sequence: Synthetic Antisense oligonucleotide
  modified_base 1: mod_base = OTHER; note = 5-methyl
  modified_base 1..2: mod_base = OTHER; note = bicyclic nucleic acid (BNA)
  modified_base 9..10: mod_base = OTHER; note = bicyclic nucleic acid (BNA)
  source 1..10: mol_type = other DNA
caaggaagat

SEQ ID NO: 10456 - DNA, 20 bp, synthetic construct
  misc_feature 1..20: note = Description of Artificial Sequence: Synthetic Antisense oligonucleotide
  modified_base 1..2: mod_base = OTHER; note = bicyclic nucleic acid (BNA)
  modified_base 19..20: mod_base = OTHER; note = bicyclic nucleic acid (BNA)
  modified_base 12: mod_base = OTHER; note = 5-methyl
  modified_base 17: mod_base = OTHER; note = 5-methyl
  source 1..20: mol_type = other DNA
aaggaagatggcatttctag

SEQ ID NO: 10457 - DNA, 19 bp, synthetic construct
  misc_feature 1..19: note = Description of Artificial Sequence: Synthetic Antisense oligonucleotide
  modified_base 1..2: mod_base = OTHER; note = bicyclic nucleic acid (BNA)
  modified_base 18..19: mod_base = OTHER; note = bicyclic nucleic acid (BNA)
  modified_base 12: mod_base = OTHER; note = 5-methyl
  modified_base 17: mod_base = OTHER; note = 5-methyl
  source 1..19: mol_type = other DNA
aaggaagatggcatttcta

SEQ ID NO: 10458 - DNA, 18 bp, synthetic construct
  misc_feature 1..18: note = Description of Artificial Sequence: Synthetic Antisense oligonucleotide
  modified_base 1..2: mod_base = OTHER; note = bicyclic nucleic acid (BNA)
  modified_base 17..18: mod_base = OTHER; note = bicyclic nucleic acid (BNA)
  modified_base 12: mod_base = OTHER; note = 5-methyl
  modified_base 17: mod_base = OTHER; note = 5-methyl
  source 1..18: mol_type = other DNA
aaggaagatggcatttct

SEQ ID NO: 10459 - DNA, 17 bp, synthetic construct
  misc_feature 1..17: note = Description of Artificial Sequence: Synthetic Antisense oligonucleotide
  modified_base 1..2: mod_base = OTHER; note = bicyclic nucleic acid (BNA)
  modified_base 16..17: mod_base = OTHER; note = bicyclic nucleic acid (BNA)
  modified_base 12: mod_base = OTHER; note = 5-methyl
  modified_base 17: mod_base = OTHER; note = 5-methyl
  source 1..17: mol_type = other DNA
aaggaagatggcatttc

SEQ ID NO: 10460 - DNA, 16 bp, synthetic construct
  misc_feature 1..16: note = Description of Artificial Sequence: Synthetic Antisense oligonucleotide
  modified_base 1..2: mod_base = OTHER; note = bicyclic nucleic acid (BNA)
  modified_base 15..16: mod_base = OTHER; note = bicyclic nucleic acid (BNA)
  modified_base 12: mod_base = OTHER; note = 5-methyl
  source 1..16: mol_type = other DNA
aaggaagatggcattt

SEQ ID NO: 10461 - DNA, 15 bp, synthetic construct
  misc_feature 1..15: note = Description of Artificial Sequence: Synthetic Antisense oligonucleotide
  modified_base 1..2: mod_base = OTHER; note = bicyclic nucleic acid (BNA)
  modified_base 14..15: mod_base = OTHER; note = bicyclic nucleic acid (BNA)
  modified_base 12: mod_base = OTHER; note = 5-methyl
  source 1..15: mol_type = other DNA
aaggaagatggcatt

SEQ ID NO: 10462 - DNA, 14 bp, synthetic construct
  misc_feature 1..14: note = Description of Artificial Sequence: Synthetic Antisense oligonucleotide
  modified_base 1..2: mod_base = OTHER; note = bicyclic nucleic acid (BNA)
  modified_base 13..14: mod_base = OTHER; note = bicyclic nucleic acid (BNA)
  modified_base 12: mod_base = OTHER; note = 5-methyl
  source 1..14: mol_type = other DNA
aaggaagatggcat

SEQ ID NO: 10463 - DNA, 13 bp, synthetic construct
  misc_feature 1..13: note = Description of Artificial Sequence: Synthetic Antisense oligonucleotide
  modified_base 1..2: mod_base = OTHER; note = bicyclic nucleic acid (BNA)
  modified_base 12..13: mod_base = OTHER; note = bicyclic nucleic acid (BNA)
  modified_base 12: mod_base = OTHER; note = 5-methyl
  source 1..13: mol_type = other DNA
aaggaagatggca

SEQ ID NO: 10464 - DNA, 12 bp, synthetic construct
  misc_feature 1..12: note = Description of Artificial Sequence: Synthetic Antisense oligonucleotide
  modified_base 1..2: mod_base = OTHER; note = bicyclic nucleic acid (BNA)
  modified_base 11..12: mod_base = OTHER; note = bicyclic nucleic acid (BNA)
  modified_base 12: mod_base = OTHER; note = 5-methyl
  source 1..12: mol_type = other DNA
aaggaagatggc

SEQ ID NO: 10465 - DNA, 19 bp, synthetic construct
  misc_feature 1..19: note = Description of Artificial Sequence: Synthetic Antisense oligonucleotide
  modified_base 1..2: mod_base = OTHER; note = bicyclic nucleic acid (BNA)
  modified_base 18..19: mod_base = OTHER; note = bicyclic nucleic acid (BNA)
  modified_base 11: mod_base = OTHER; note = 5-methyl
  modified_base 16: mod_base = OTHER; note = 5-methyl
  source 1..19: mol_type = other DNA
aggaagatggcatttctag

SEQ ID NO: 10466 - DNA, 18 bp, synthetic construct
  misc_feature 1..18: note = Description of Artificial Sequence: Synthetic Antisense oligonucleotide
  modified_base 1..2: mod_base = OTHER; note = bicyclic nucleic acid (BNA)
  modified_base 17..18: mod_base = OTHER; note = bicyclic nucleic acid (BNA)
  modified_base 11: mod_base = OTHER; note = 5-methyl
  modified_base 16: mod_base = OTHER; note = 5-methyl
  source 1..18: mol_type = other DNA
aggaagatggcatttcta

SEQ ID NO: 10467 - DNA, 17 bp, synthetic construct
  misc_feature 1..17: note = Description of Artificial Sequence: Synthetic Antisense oligonucleotide
  modified_base 1..2: mod_base = OTHER; note = bicyclic nucleic acid (BNA)
  modified_base 16..17: mod_base = OTHER; note = bicyclic nucleic acid (BNA)
  modified_base 11: mod_base = OTHER; note = 5-methyl
  modified_base 16: mod_base = OTHER; note = 5-methyl
  source 1..17: mol_type = other DNA
aggaagatggcatttct

SEQ ID NO: 10468 - DNA, 16 bp, synthetic construct
  misc_feature 1..16: note = Description of Artificial Sequence: Synthetic Antisense oligonucleotide
  modified_base 1..2: mod_base = OTHER; note = bicyclic nucleic acid (BNA)
  modified_base 15..16: mod_base = OTHER; note = bicyclic nucleic acid (BNA)
  modified_base 11: mod_base = OTHER; note = 5-methyl
  modified_base 16: mod_base = OTHER; note = 5-methyl
  source 1..16: mol_type = other DNA
aggaagatggcatttc

SEQ ID NO: 10469 - DNA, 15 bp, synthetic construct
  misc_feature 1..15: note = Description of Artificial Sequence: Synthetic Antisense oligonucleotide
  modified_base 1..2: mod_base = OTHER; note = bicyclic nucleic acid (BNA)
  modified_base 14..15: mod_base = OTHER; note = bicyclic nucleic acid (BNA)
  modified_base 11: mod_base = OTHER; note = 5-methyl
  source 1..15: mol_type = other DNA
aggaagatggcattt

SEQ ID NO: 10470 - DNA, 14 bp, synthetic construct
  misc_feature 1..14: note = Description of Artificial Sequence: Synthetic Antisense oligonucleotide
  modified_base 1..2: mod_base = OTHER; note = bicyclic nucleic acid (BNA)
  modified_base 13..14: mod_base = OTHER; note = bicyclic nucleic acid (BNA)
  modified_base 11: mod_base = OTHER; note = 5-methyl
  source 1..14: mol_type = other DNA
aggaagatggcatt

SEQ ID NO: 10471 - DNA, 13 bp, synthetic construct
  misc_feature 1..13: note = Description of Artificial Sequence: Synthetic Antisense oligonucleotide
  modified_base 1..2: mod_base = OTHER; note = bicyclic nucleic acid (BNA)
  modified_base 12..13: mod_base = OTHER; note = bicyclic nucleic acid (BNA)
  modified_base 11: mod_base = OTHER; note = 5-methyl
  source 1..13: mol_type = other DNA
aggaagatggcat

SEQ ID NO: 10472 - DNA, 12 bp, synthetic construct
  misc_feature 1..12: note = Description of Artificial Sequence: Synthetic Antisense oligonucleotide
  modified_base 1..2: mod_base = OTHER; note = bicyclic nucleic acid (BNA)
  modified_base 11..12: mod_base = OTHER; note = bicyclic nucleic acid (BNA)
  modified_base 11: mod_base = OTHER; note = 5-methyl
  source 1..12: mol_type = other DNA
aggaagatggca

SEQ ID NO: 10473 - DNA, 18 bp, synthetic construct
  misc_feature 1..18: note = Description of Artificial Sequence: Synthetic Antisense oligonucleotide
  modified_base 1..2: mod_base = OTHER; note = bicyclic nucleic acid (BNA)
  modified_base 17..18: mod_base = OTHER; note = bicyclic nucleic acid (BNA)
  modified_base 10: mod_base = OTHER; note = 5-methyl
  modified_base 15: mod_base = OTHER; note = 5-methyl
  source 1..18: mol_type = other DNA
ggaagatggcatttctag

SEQ ID NO: 10474 - DNA, 17 bp, synthetic construct
  misc_feature 1..17: note = Description of Artificial Sequence: Synthetic Antisense oligonucleotide
  modified_base 1..2: mod_base = OTHER; note = bicyclic nucleic acid (BNA)
  modified_base 16..17: mod_base = OTHER; note = bicyclic nucleic acid (BNA)
  modified_base 10: mod_base = OTHER; note = 5-methyl
  modified_base 15: mod_base = OTHER; note = 5-methyl
  source 1..17: mol_type = other DNA
ggaagatggcatttcta

SEQ ID NO: 10475 - DNA, 16 bp, synthetic construct
  misc_feature 1..16: note = Description of Artificial Sequence: Synthetic Antisense oligonucleotide
  modified_base 1..2: mod_base = OTHER; note = bicyclic nucleic acid (BNA)
  modified_base 15..16: mod_base = OTHER; note = bicyclic nucleic acid (BNA)
  modified_base 10: mod_base = OTHER; note = 5-methyl
  modified_base 15: mod_base = OTHER; note = 5-methyl
  source 1..16: mol_type = other DNA
ggaagatggcatttct

SEQ ID NO: 10476 - DNA, 15 bp, synthetic construct
  misc_feature 1..15: note = Description of Artificial Sequence: Synthetic Antisense oligonucleotide
  modified_base 1..2: mod_base = OTHER; note = bicyclic nucleic acid (BNA)
  modified_base 14..15: mod_base = OTHER; note = bicyclic nucleic acid (BNA)
  modified_base 10: mod_base = OTHER; note = 5-methyl
  modified_base 15: mod_base = OTHER; note = 5-methyl
  source 1..15: mol_type = other DNA
ggaagatggcatttc

SEQ ID NO: 10477 - DNA, 14 bp, synthetic construct
  misc_feature 1..14: note = Description of Artificial Sequence: Synthetic Antisense oligonucleotide
  modified_base 1..2: mod_base = OTHER; note = bicyclic nucleic acid (BNA)
  modified_base 13..14: mod_base = OTHER; note = bicyclic nucleic acid (BNA)
  modified_base 10: mod_base = OTHER; note = 5-methyl
  source 1..14: mol_type = other DNA
ggaagatggcattt

SEQ ID NO: 10478 - DNA, 13 bp, synthetic construct
  misc_feature 1..13: note = Description of Artificial Sequence: Synthetic Antisense oligonucleotide
  modified_base 1..2: mod_base = OTHER; note = bicyclic nucleic acid (BNA)
  modified_base 12..13: mod_base = OTHER; note = bicyclic nucleic acid (BNA)
  modified_base 10: mod_base = OTHER; note = 5-methyl
  source 1..13: mol_type = other DNA
ggaagatggcatt

SEQ ID NO: 10479 - DNA, 12 bp, synthetic construct
  misc_feature 1..12: note = Description of Artificial Sequence: Synthetic Antisense oligonucleotide
  modified_base 1..2: mod_base = OTHER; note = bicyclic nucleic acid (BNA)
  modified_base 11..12: mod_base = OTHER; note = bicyclic nucleic acid (BNA)
  modified_base 10: mod_base = OTHER; note = 5-methyl
  source 1..12: mol_type = other DNA
ggaagatggcat

SEQ ID NO: 10480 - DNA, 11 bp, synthetic construct
  misc_feature 1..11: note = Description of Artificial Sequence: Synthetic Antisense oligonucleotide
  modified_base 1..2: mod_base = OTHER; note = bicyclic nucleic acid (BNA)
  modified_base 10..11: mod_base = OTHER; note = bicyclic nucleic acid (BNA)
  modified_base 10: mod_base = OTHER; note = 5-methyl
  source 1..11: mol_type = other DNA
ggaagatggca

SEQ ID NO: 10481 - DNA, 10 bp, synthetic construct
  misc_feature 1..10: note = Description of Artificial Sequence: Synthetic Antisense oligonucleotide
  modified_base 1..2: mod_base = OTHER; note = bicyclic nucleic acid (BNA)
  modified_base 9..10: mod_base = OTHER; note = bicyclic nucleic acid (BNA)
  modified_base 10: mod_base = OTHER; note = 5-methyl
  source 1..10: mol_type = other DNA
ggaagatggc

SEQ ID NO: 10482 - DNA, 17 bp, synthetic construct
  misc_feature 1..17: note = Description of Artificial Sequence: Synthetic Antisense oligonucleotide
  modified_base 1..2: mod_base = OTHER; note = bicyclic nucleic acid (BNA)
  modified_base 16..17: mod_base = OTHER; note = bicyclic nucleic acid (BNA)
  modified_base 9: mod_base = OTHER; note = 5-methyl
  modified_base 14: mod_base = OTHER; note = 5-methyl
  source 1..17: mol_type = other DNA
gaagatggcatttctag

SEQ ID NO: 10483 - DNA, 16 bp, synthetic construct
  misc_feature 1..16: note = Description of Artificial Sequence: Synthetic Antisense oligonucleotide
  modified_base 1..2: mod_base = OTHER; note = bicyclic nucleic acid (BNA)
  modified_base 15..16: mod_base = OTHER; note = bicyclic nucleic acid (BNA)
  modified_base 9: mod_base = OTHER; note = 5-methyl
  modified_base 14: mod_base = OTHER; note = 5-methyl
  source 1..16: mol_type = other DNA
gaagatggcatttcta

SEQ ID NO: 10484 - DNA, 14 bp, synthetic construct
  misc_feature 1..14: note = Description of Artificial Sequence: Synthetic Antisense oligonucleotide
  modified_base 1..2: mod_base = OTHER; note = bicyclic nucleic acid (BNA)
  modified_base 13..14: mod_base = OTHER; note = bicyclic nucleic acid (BNA)
  modified_base 9: mod_base = OTHER; note = 5-methyl
  modified_base 14: mod_base = OTHER; note = 5-methyl
  source 1..14: mol_type = other DNA
gaagatggcatttc

SEQ ID NO: 10485 - DNA, 13 bp, synthetic construct
  misc_feature 1..13: note = Description of Artificial Sequence: Synthetic Antisense oligonucleotide
  modified_base 1..2: mod_base = OTHER; note = bicyclic nucleic acid (BNA)
  modified_base 12..13: mod_base = OTHER; note = bicyclic nucleic acid (BNA)
  modified_base 9: mod_base = OTHER; note = 5-methyl
  source 1..13: mol_type = other DNA
gaagatggcattt

SEQ ID NO: 10486 - DNA, 12 bp, synthetic construct
  misc_feature 1..12: note = Description of Artificial Sequence: Synthetic Antisense oligonucleotide
  modified_base 1..2: mod_base = OTHER; note = bicyclic nucleic acid (BNA)
  modified_base 11..12: mod_base = OTHER; note = bicyclic nucleic acid (BNA)
  modified_base 9: mod_base = OTHER; note = 5-methyl
  source 1..12: mol_type = other DNA
gaagatggcatt

SEQ ID NO: 10487 - DNA, 11 bp, synthetic construct
  misc_feature 1..11: note = Description of Artificial Sequence: Synthetic Antisense oligonucleotide
  modified_base 1..2: mod_base = OTHER; note = bicyclic nucleic acid (BNA)
  modified_base 10..11: mod_base = OTHER; note = bicyclic nucleic acid (BNA)
  modified_base 9: mod_base = OTHER; note = 5-methyl
  source 1..11: mol_type = other DNA
gaagatggcat

SEQ ID NO: 10488 - DNA, 10 bp, synthetic construct
  misc_feature 1..10: note = Description of Artificial Sequence: Synthetic Antisense oligonucleotide
  modified_base 1..2: mod_base = OTHER; note = bicyclic nucleic acid (BNA)
  modified_base 9..10: mod_base = OTHER; note = bicyclic nucleic acid (BNA)
  modified_base 9: mod_base = OTHER; note = 5-methyl
  source 1..10: mol_type = other DNA
gaagatggca

SEQ ID NO: 10489 - skipped

SEQ ID NO: 10490 - DNA, 16 bp, synthetic construct
  misc_feature 1..16: note = Description of Artificial Sequence: Synthetic Antisense oligonucleotide
  modified_base 1..2: mod_base = OTHER; note = bicyclic nucleic acid (BNA)
  modified_base 15..16: mod_base = OTHER; note = bicyclic nucleic acid (BNA)
  modified_base 8: mod_base = OTHER; note = 5-methyl
  modified_base 13: mod_base = OTHER; note = 5-methyl
  source 1..16: mol_type = other DNA
aagatggcatttctag

SEQ ID NO: 10491 - DNA, 15 bp, synthetic construct
  misc_feature 1..15: note = Description of Artificial Sequence: Synthetic Antisense oligonucleotide
  modified_base 1..2: mod_base = OTHER; note = bicyclic nucleic acid (BNA)
  modified_base 14..15: mod_base = OTHER; note = bicyclic nucleic acid (BNA)
  modified_base 8: mod_base = OTHER; note = 5-methyl
  modified_base 13: mod_base = OTHER; note = 5-methyl
  source 1..15: mol_type = other DNA
aagatggcatttcta

SEQ ID NO: 10492 - DNA, 14 bp, synthetic construct
  misc_feature 1..14: note = Description of Artificial Sequence: Synthetic Antisense oligonucleotide
  modified_base 1..2: mod_base = OTHER; note = bicyclic nucleic acid (BNA)
  modified_base 13..14: mod_base = OTHER; note = bicyclic nucleic acid (BNA)
  modified_base 8: mod_base = OTHER; note = 5-methyl
  modified_base 13: mod_base = OTHER; note = 5-methyl
  source 1..14: mol_type = other DNA
aagatggcatttct

SEQ ID NO: 10493 - DNA, 13 bp, synthetic construct
  misc_feature 1..13: note = Description of Artificial Sequence: Synthetic Antisense oligonucleotide
  modified_base 1..2: mod_base = OTHER; note = bicyclic nucleic acid (BNA)
  modified_base 12..13: mod_base = OTHER; note = bicyclic nucleic acid (BNA)
  modified_base 8: mod_base = OTHER; note = 5-methyl
  modified_base 13: mod_base = OTHER; note = 5-methyl
  source 1..13: mol_type = other DNA
aagatggcatttc

SEQ ID NO: 10494 - DNA, 12 bp, synthetic construct
  misc_feature 1..12: note = Description of Artificial Sequence: Synthetic Antisense oligonucleotide
  modified_base 1..2: mod_base = OTHER; note = bicyclic nucleic acid (BNA)
  modified_base 11..12: mod_base = OTHER; note = bicyclic nucleic acid (BNA)
  modified_base 8: mod_base = OTHER; note = 5-methyl
  source 1..12: mol_type = other DNA
aagatggcattt

SEQ ID NO: 10495 - DNA, 11 bp, synthetic construct
  misc_feature 1..11: note = Description of Artificial Sequence: Synthetic Antisense oligonucleotide
  modified_base 1..2: mod_base = OTHER; note = bicyclic nucleic acid (BNA)
  modified_base 10..11: mod_base = OTHER; note = bicyclic nucleic acid (BNA)
  modified_base 8: mod_base = OTHER; note = 5-methyl
  source 1..11: mol_type = other DNA
aagatggcatt

SEQ ID NO: 10496 - DNA, 10 bp, synthetic construct
  misc_feature 1..10: note = Description of Artificial Sequence: Synthetic Antisense oligonucleotide
  modified_base 1..2: mod_base = OTHER; note = bicyclic nucleic acid (BNA)
  modified_base 9..10: mod_base = OTHER; note = bicyclic nucleic acid (BNA)
  modified_base 8: mod_base = OTHER; note = 5-methyl
  source 1..10: mol_type = other DNA
aagatggcat

SEQ ID NO: 10497-10498 - skipped (2 entries)

SEQ ID NO: 10499 - DNA, 15 bp, synthetic construct
  misc_feature 1..15: note = Description of Artificial Sequence: Synthetic Antisense oligonucleotide
  modified_base 1..2: mod_base = OTHER; note = bicyclic nucleic acid (BNA)
  modified_base 14..15: mod_base = OTHER; note = bicyclic nucleic acid (BNA)
  modified_base 7: mod_base = OTHER; note = 5-methyl
  modified_base 12: mod_base = OTHER; note = 5-methyl
  source 1..15: mol_type = other DNA
agatggcatttctag

SEQ ID NO: 10500 - DNA, 14 bp, synthetic construct
  misc_feature 1..14: note = Description of Artificial Sequence: Synthetic Antisense oligonucleotide
  modified_base 1..2: mod_base = OTHER; note = bicyclic nucleic acid (BNA)
  modified_base 13..14: mod_base = OTHER; note = bicyclic nucleic acid (BNA)
  modified_base 7: mod_base = OTHER; note = 5-methyl
  modified_base 12: mod_base = OTHER; note = 5-methyl
  source 1..14: mol_type = other DNA
agatggcatttcta

SEQ ID NO: 10501 - DNA, 13 bp, synthetic construct
  misc_feature 1..13: note = Description of Artificial Sequence: Synthetic Antisense oligonucleotide
  modified_base 1..2: mod_base = OTHER; note = bicyclic nucleic acid (BNA)
  modified_base 12..13: mod_base = OTHER; note = bicyclic nucleic acid (BNA)
  modified_base 7: mod_base = OTHER; note = 5-methyl
  modified_base 12: mod_base = OTHER; note = 5-methyl
  source 1..13: mol_type = other DNA
agatggcatttct

SEQ ID NO: 10502 - DNA, 12 bp, synthetic construct
  misc_feature 1..12: note = Description of Artificial Sequence: Synthetic Antisense oligonucleotide
  modified_base 1..2: mod_base = OTHER; note = bicyclic nucleic acid (BNA)
  modified_base 11..12: mod_base = OTHER; note = bicyclic nucleic acid (BNA)
  modified_base 7: mod_base = OTHER; note = 5-methyl
  modified_base 12: mod_base = OTHER; note = 5-methyl
  source 1..12: mol_type = other DNA
agatggcatttc

SEQ ID NO: 10503 - DNA, 11 bp, synthetic construct
  misc_feature 1..11: note = Description of Artificial Sequence: Synthetic Antisense oligonucleotide
  modified_base 1..2: mod_base = OTHER; note = bicyclic nucleic acid (BNA)
  modified_base 10..11: mod_base = OTHER; note = bicyclic nucleic acid (BNA)
  modified_base 7: mod_base = OTHER; note = 5-methyl
  source 1..11: mol_type = other DNA
agatggcattt

SEQ ID NO: 10504 - DNA, 10 bp, synthetic construct
  misc_feature 1..10: note = Description of Artificial Sequence: Synthetic Antisense oligonucleotide
  modified_base 1..2: mod_base = OTHER; note = bicyclic nucleic acid (BNA)
  modified_base 9..10: mod_base = OTHER; note = bicyclic nucleic acid (BNA)
  modified_base 7: mod_base = OTHER; note = 5-methyl
  source 1..10: mol_type = other DNA
agatggcatt

SEQ ID NO: 10505-10506 - skipped (2 entries)

SEQ ID NO: 10507 - DNA, 30 bp, synthetic construct; identical to SEQ ID NO: 8
  misc_feature 1..30: note = Description of Artificial Sequence: Synthetic Antisense oligonucleotide
  modified_base 1: mod_base = OTHER; note = 5-methyl
  modified_base 3..4: mod_base = OTHER; note = 5-methyl
  modified_base 7: mod_base = OTHER; note = 5-methyl
  modified_base 10: mod_base = OTHER; note = 5-methyl
  modified_base 22: mod_base = OTHER; note = 5-methyl
  modified_base 27: mod_base = OTHER; note = 5-methyl
  modified_base 1..2: mod_base = OTHER; note = bicyclic nucleic acid (BNA)
  modified_base 29..30: mod_base = OTHER; note = bicyclic nucleic acid (BNA)
  source 1..30: mol_type = other DNA

SEQ ID NO: 10508 - DNA, 29 bp, synthetic construct
  misc_feature 1..29: note = Description of Artificial Sequence: Synthetic Antisense oligonucleotide
  modified_base 1: mod_base = OTHER; note = 5-methyl
  modified_base 3..4: mod_base = OTHER; note = 5-methyl
  modified_base 7: mod_base = OTHER; note = 5-methyl
  modified_base 10: mod_base = OTHER; note = 5-methyl
  modified_base 22: mod_base = OTHER; note = 5-methyl
  modified_base 27: mod_base = OTHER; note = 5-methyl
  modified_base 1..2: mod_base = OTHER; note = bicyclic nucleic acid (BNA)
  modified_base 28..29: mod_base = OTHER; note = bicyclic nucleic acid (BNA)
  source 1..29: mol_type = other DNA
ctccaacatcaaggaagatggcatttcta

SEQ ID NO: 10509 - DNA, 28 bp, synthetic construct
  misc_feature 1..28: note = Description of Artificial Sequence: Synthetic Antisense oligonucleotide
  modified_base 1: mod_base = OTHER; note = 5-methyl
  modified_base 3..4: mod_base = OTHER; note = 5-methyl
  modified_base 7: mod_base = OTHER; note = 5-methyl
  modified_base 10: mod_base = OTHER; note = 5-methyl
  modified_base 22: mod_base = OTHER; note = 5-methyl
  modified_base 27: mod_base = OTHER; note = 5-methyl
  modified_base 1..2: mod_base = OTHER; note = bicyclic nucleic acid (BNA)
  modified_base 27..28: mod_base = OTHER; note = bicyclic nucleic acid (BNA)
  source 1..28: mol_type = other DNA
ctccaacatcaaggaagatggcatttct

SEQ ID NO: 10510 - DNA, 27 bp, synthetic construct
  misc_feature 1..27: note = Description of Artificial Sequence: Synthetic Antisense oligonucleotide
  modified_base 1: mod_base = OTHER; note = 5-methyl
  modified_base 3..4: mod_base = OTHER; note = 5-methyl
  modified_base 7: mod_base = OTHER; note = 5-methyl
  modified_base 10: mod_base = OTHER; note = 5-methyl
  modified_base 22: mod_base = OTHER; note = 5-methyl
  modified_base 27: mod_base = OTHER; note = 5-methyl
  modified_base 1..2: mod_base = OTHER; note = bicyclic nucleic acid (BNA)
  modified_base 26..27: mod_base = OTHER; note = bicyclic nucleic acid (BNA)
  source 1..27: mol_type = other DNA
ctccaacatcaaggaagatggcatttc

SEQ ID NO: 10511 - DNA, 26 bp, synthetic construct
  misc_feature 1..26: note = Description of Artificial Sequence: Synthetic Antisense oligonucleotide
  modified_base 1: mod_base = OTHER; note = 5-methyl
  modified_base 3..4: mod_base = OTHER; note = 5-methyl
  modified_base 7: mod_base = OTHER; note = 5-methyl
  modified_base 10: mod_base = OTHER; note = 5-methyl
  modified_base 22: mod_base = OTHER; note = 5-methyl
  modified_base 1..2: mod_base = OTHER; note = bicyclic nucleic acid (BNA)
  modified_base 25..26: mod_base = OTHER; note = bicyclic nucleic acid (BNA)
  source 1..26: mol_type = other DNA
ctccaacatcaaggaagatggcattt

SEQ ID NO: 10512 - DNA, 25 bp, synthetic construct
  misc_feature 1..25: note = Description of Artificial Sequence: Synthetic Antisense oligonucleotide
  modified_base 1: mod_base = OTHER; note = 5-methyl
  modified_base 3..4: mod_base = OTHER; note = 5-methyl
  modified_base 7: mod_base = OTHER; note = 5-methyl
  modified_base 10: mod_base = OTHER; note = 5-methyl
  modified_base 22: mod_base = OTHER; note = 5-methyl
  modified_base 1..2: mod_base = OTHER; note = bicyclic nucleic acid (BNA)
  modified_base 24..25: mod_base = OTHER; note = bicyclic nucleic acid (BNA)
  source 1..25: mol_type = other DNA
ctccaacatcaaggaagatggcatt

SEQ ID NO: 10513 - DNA, 24 bp, synthetic construct
  misc_feature 1..24: note = Description of Artificial Sequence: Synthetic Antisense oligonucleotide
  modified_base 1: mod_base = OTHER; note = 5-methyl
  modified_base 3..4: mod_base = OTHER; note = 5-methyl
  modified_base 7: mod_base = OTHER; note = 5-methyl
  modified_base 10: mod_base = OTHER; note = 5-methyl
  modified_base 22: mod_base = OTHER; note = 5-methyl
  modified_base 1..2: mod_base = OTHER; note = bicyclic nucleic acid (BNA)
  modified_base 23..24: mod_base = OTHER; note = bicyclic nucleic acid (BNA)
  source 1..24: mol_type = other DNA
ctccaacatcaaggaagatggcat

SEQ ID NO: 10514 - DNA, 23 bp, synthetic construct
  misc_feature 1..23: note = Description of Artificial Sequence: Synthetic Antisense oligonucleotide
  modified_base 1: mod_base = OTHER; note = 5-methyl
  modified_base 3..4: mod_base = OTHER; note = 5-methyl
  modified_base 7: mod_base = OTHER; note = 5-methyl
  modified_base 10: mod_base = OTHER; note = 5-methyl
  modified_base 22: mod_base = OTHER; note = 5-methyl
  modified_base 1..2: mod_base = OTHER; note = bicyclic nucleic acid (BNA)
  modified_base 22..23: mod_base = OTHER; note = bicyclic nucleic acid (BNA)
  source 1..23: mol_type = other DNA
ctccaacatcaaggaagatggca

SEQ ID NO: 10515 - DNA, 22 bp, synthetic construct
  misc_feature 1..22: note = Description of Artificial Sequence: Synthetic Antisense oligonucleotide
  modified_base 1: mod_base = OTHER; note = 5-methyl
  modified_base 3..4: mod_base = OTHER; note = 5-methyl
  modified_base 7: mod_base = OTHER; note = 5-methyl
  modified_base 10: mod_base = OTHER; note = 5-methyl
  modified_base 22: mod_base = OTHER; note = 5-methyl
  modified_base 1..2: mod_base = OTHER; note = bicyclic nucleic acid (BNA)
  modified_base 21..22: mod_base = OTHER; note = bicyclic nucleic acid (BNA)
  source 1..22: mol_type = other DNA
ctccaacatcaaggaagatggc

SEQ ID NO: 10516 - DNA, 21 bp, synthetic construct
  misc_feature 1..21: note = Description of Artificial Sequence: Synthetic Antisense oligonucleotide
  modified_base 1: mod_base = OTHER; note = 5-methyl
  modified_base 3..4: mod_base = OTHER; note = 5-methyl
  modified_base 7: mod_base = OTHER; note = 5-methyl
  modified_base 10: mod_base = OTHER; note = 5-methyl
  modified_base 1..2: mod_base = OTHER; note = bicyclic nucleic acid (BNA)
  modified_base 20..21: mod_base = OTHER; note = bicyclic nucleic acid (BNA)
  source 1..21: mol_type = other DNA
ctccaacatcaaggaagatgg

SEQ ID NO: 10517 - DNA, 20 bp, synthetic construct
  misc_feature 1..20: note = Description of Artificial Sequence: Synthetic Antisense oligonucleotide
  modified_base 1: mod_base = OTHER; note = 5-methyl
  modified_base 3..4: mod_base = OTHER; note = 5-methyl
  modified_base 7: mod_base = OTHER; note = 5-methyl
  modified_base 10: mod_base = OTHER; note = 5-methyl
  modified_base 1..2: mod_base = OTHER; note = bicyclic nucleic acid (BNA)
  modified_base 19..20: mod_base = OTHER; note = bicyclic nucleic acid (BNA)
  source 1..20: mol_type = other DNA
ctccaacatcaaggaagatg

SEQ ID NO: 10518 - DNA, 19 bp, synthetic construct
  misc_feature 1..19: note = Description of Artificial Sequence: Synthetic Antisense oligonucleotide
  modified_base 1: mod_base = OTHER; note = 5-methyl
  modified_base 3..4: mod_base = OTHER; note = 5-methyl
  modified_base 7: mod_base = OTHER; note = 5-methyl
  modified_base 10: mod_base = OTHER; note = 5-methyl
  modified_base 1..2: mod_base = OTHER; note = bicyclic nucleic acid (BNA)
  modified_base 18..19: mod_base = OTHER; note = bicyclic nucleic acid (BNA)
  source 1..19: mol_type = other DNA
ctccaacatcaaggaagat

SEQ ID NO: 10519 - DNA, 18 bp, synthetic construct
  misc_feature 1..18: note = Description of Artificial Sequence: Synthetic Antisense oligonucleotide
  modified_base 1: mod_base = OTHER; note = 5-methyl
  modified_base 3..4: mod_base = OTHER; note = 5-methyl
  modified_base 7: mod_base = OTHER; note = 5-methyl
  modified_base 10: mod_base = OTHER; note = 5-methyl
  modified_base 1..2: mod_base = OTHER; note = bicyclic nucleic acid (BNA)
  modified_base 17..18: mod_base = OTHER; note = bicyclic nucleic acid (BNA)
  source 1..18: mol_type = other DNA
ctccaacatcaaggaaga

SEQ ID NO: 10520 - DNA, 17 bp, synthetic construct
  misc_feature 1..17: note = Description of Artificial Sequence: Synthetic Antisense oligonucleotide
  modified_base 1: mod_base = OTHER; note = 5-methyl
  modified_base 3..4: mod_base = OTHER; note = 5-methyl
  modified_base 7: mod_base = OTHER; note = 5-methyl
  modified_base 10: mod_base = OTHER; note = 5-methyl
  modified_base 1..2: mod_base = OTHER; note = bicyclic nucleic acid (BNA)
  modified_base 16..17: mod_base = OTHER; note = bicyclic nucleic acid (BNA)
  source 1..17: mol_type = other DNA
ctccaacatcaaggaag

SEQ ID NO: 10521 - DNA, 29 bp, synthetic construct
  misc_feature 1..29: note = Description of Artificial Sequence: Synthetic Antisense oligonucleotide
  modified_base 1..2: mod_base = OTHER; note = bicyclic nucleic acid (BNA)
  modified_base 28..29: mod_base = OTHER; note = bicyclic nucleic acid (BNA)
  modified_base 2..3: mod_base = OTHER; note = 5-methyl
  modified_base 6: mod_base = OTHER; note = 5-methyl
  modified_base 9: mod_base = OTHER; note = 5-methyl
  modified_base 21: mod_base = OTHER; note = 5-methyl
  modified_base 26: mod_base = OTHER; note = 5-methyl
  source 1..29: mol_type = other DNA
tccaacatcaaggaagatggcatttctag

SEQ ID NO: 10522 - DNA, 28 bp, synthetic construct
  misc_feature 1..28: note = Description of Artificial Sequence: Synthetic Antisense oligonucleotide
  modified_base 1..2: mod_base = OTHER; note = bicyclic nucleic acid (BNA)
  modified_base 27..28: mod_base = OTHER; note = bicyclic nucleic acid (BNA)
  modified_base 2..3: mod_base = OTHER; note = 5-methyl
  modified_base 6: mod_base = OTHER; note = 5-methyl
  modified_base 9: mod_base = OTHER; note = 5-methyl
  modified_base 21: mod_base = OTHER; note = 5-methyl
  modified_base 26: mod_base = OTHER; note = 5-methyl
  source 1..28: mol_type = other DNA
tccaacatcaaggaagatggcatttcta

SEQ ID NO: 10523 - DNA, 27 bp, synthetic construct
  misc_feature 1..27: note = Description of Artificial Sequence: Synthetic Antisense oligonucleotide
  modified_base 1..2: mod_base = OTHER; note = bicyclic nucleic acid (BNA)
  modified_base 26..27: mod_base = OTHER; note = bicyclic nucleic acid (BNA)
  modified_base 2..3: mod_base = OTHER; note = 5-methyl
  modified_base 6: mod_base = OTHER; note = 5-methyl
  modified_base 9: mod_base = OTHER; note = 5-methyl
  modified_base 21: mod_base = OTHER; note = 5-methyl
  modified_base 26: mod_base = OTHER; note = 5-methyl
  source 1..27: mol_type = other DNA
tccaacatcaaggaagatggcatttct

SEQ ID NO: 10524 - DNA, 26 bp, synthetic construct
  misc_feature 1..26: note = Description of Artificial Sequence: Synthetic Antisense oligonucleotide
  modified_base 1..2: mod_base = OTHER; note = bicyclic nucleic acid (BNA)
  modified_base 25..26: mod_base = OTHER; note = bicyclic nucleic acid (BNA)
  modified_base 2..3: mod_base = OTHER; note = 5-methyl
  modified_base 6: mod_base = OTHER; note = 5-methyl
  modified_base 9: mod_base = OTHER; note = 5-methyl
  modified_base 21: mod_base = OTHER; note = 5-methyl
  modified_base 26: mod_base = OTHER; note = 5-methyl
  source 1..26: mol_type = other DNA
tccaacatcaaggaagatggcatttc

SEQ ID NO: 10525 - DNA, 25 bp, synthetic construct
  misc_feature 1..25: note = Description of Artificial Sequence: Synthetic Antisense oligonucleotide
  modified_base 1..2: mod_base = OTHER; note = bicyclic nucleic acid (BNA)
  modified_base 24..25: mod_base = OTHER; note = bicyclic nucleic acid (BNA)
  modified_base 2..3: mod_base = OTHER; note = 5-methyl
  modified_base 6: mod_base = OTHER; note = 5-methyl
  modified_base 9: mod_base = OTHER; note = 5-methyl
  modified_base 21: mod_base = OTHER; note = 5-methyl
  source 1..25: mol_type = other DNA
tccaacatcaaggaagatggcattt

SEQ ID NO: 10526 - DNA, 24 bp, synthetic construct
  misc_feature 1..24: note = Description of Artificial Sequence: Synthetic Antisense oligonucleotide
  modified_base 1..2: mod_base = OTHER; note = bicyclic nucleic acid (BNA)
  modified_base 23..24: mod_base = OTHER; note = bicyclic nucleic acid (BNA)
  modified_base 2..3: mod_base = OTHER; note = 5-methyl
  modified_base 6: mod_base = OTHER; note = 5-methyl
  modified_base 9: mod_base = OTHER; note = 5-methyl
  modified_base 21: mod_base = OTHER; note = 5-methyl
  source 1..24: mol_type = other DNA
tccaacatcaaggaagatggcatt

SEQ ID NO: 10527 - DNA, 23 bp, synthetic construct
  misc_feature 1..23: note = Description of Artificial Sequence: Synthetic Antisense oligonucleotide
  modified_base 1..2: mod_base = OTHER; note = bicyclic nucleic acid (BNA)
  modified_base 22..23: mod_base = OTHER; note = bicyclic nucleic acid (BNA)
  modified_base 2..3: mod_base = OTHER; note = 5-methyl
  modified_base 6: mod_base = OTHER; note = 5-methyl
  modified_base 9: mod_base = OTHER; note = 5-methyl
  modified_base 21: mod_base = OTHER; note = 5-methyl
  source 1..23: mol_type = other DNA
tccaacatcaaggaagatggcat

SEQ ID NO: 10528 - DNA, 22 bp, synthetic construct
  misc_feature 1..22: note = Description of Artificial Sequence: Synthetic Antisense oligonucleotide
  modified_base 1..2: mod_base = OTHER; note = bicyclic nucleic acid (BNA)
  modified_base 21..22: mod_base = OTHER; note = bicyclic nucleic acid (BNA)
  modified_base 2..3: mod_base = OTHER; note = 5-methyl
  modified_base 6: mod_base = OTHER; note = 5-methyl
  modified_base 9: mod_base = OTHER; note = 5-methyl
  modified_base 21: mod_base = OTHER; note = 5-methyl
  source 1..22: mol_type = other DNA
tccaacatcaaggaagatggca

SEQ ID NO: 10529 - DNA, 21 bp, synthetic construct
  misc_feature 1..21: note = Description of Artificial Sequence: Synthetic Antisense oligonucleotide
  modified_base 1..2: mod_base = OTHER; note = bicyclic nucleic acid (BNA)
  modified_base 20..21: mod_base = OTHER; note = bicyclic nucleic acid (BNA)
  modified_base 2..3: mod_base = OTHER; note = 5-methyl
  modified_base 6: mod_base = OTHER; note = 5-methyl
  modified_base 9: mod_base = OTHER; note = 5-methyl
  modified_base 21: mod_base = OTHER; note = 5-methyl
  source 1..21: mol_type = other DNA
tccaacatcaaggaagatggc

SEQ ID NO: 10530 - DNA, 20 bp, synthetic construct
  misc_feature 1..20: note = Description of Artificial Sequence: Synthetic Antisense oligonucleotide
  modified_base 1..2: mod_base = OTHER; note = bicyclic nucleic acid (BNA)
  modified_base 19..20: mod_base = OTHER; note = bicyclic nucleic acid (BNA)
  modified_base 2..3: mod_base = OTHER; note = 5-methyl
  modified_base 6: mod_base = OTHER; note = 5-methyl
  modified_base 9: mod_base = OTHER; note = 5-methyl
  source 1..20: mol_type = other DNA
tccaacatcaaggaagatgg

SEQ ID NO: 10531 - DNA, 19 bp, synthetic construct
  misc_feature 1..19: note = Description of Artificial Sequence: Synthetic Antisense oligonucleotide
  modified_base 1..2: mod_base = OTHER; note = bicyclic nucleic acid (BNA)
  modified_base 18..19: mod_base = OTHER; note = bicyclic nucleic acid (BNA)
  modified_base 2..3: mod_base = OTHER; note = 5-methyl
  modified_base 6: mod_base = OTHER; note = 5-methyl
  modified_base 9: mod_base = OTHER; note = 5-methyl
  source 1..19: mol_type = other DNA
tccaacatcaaggaagatg

SEQ ID NO: 10532 - DNA, 18 bp, synthetic construct
  misc_feature 1..18: note = Description of Artificial Sequence: Synthetic Antisense oligonucleotide
  modified_base 1..2: mod_base = OTHER; note = bicyclic nucleic acid (BNA)
  modified_base 17..18: mod_base = OTHER; note = bicyclic nucleic acid (BNA)
  modified_base 2..3: mod_base = OTHER; note = 5-methyl
  modified_base 6: mod_base = OTHER; note = 5-methyl
  modified_base 9: mod_base = OTHER; note = 5-methyl
  source 1..18: mol_type = other DNA
tccaacatcaaggaagat

SEQ ID NO: 10533 - DNA, 17 bp, synthetic construct
  misc_feature 1..17: note = Description of Artificial Sequence: Synthetic Antisense oligonucleotide
  modified_base 1..2: mod_base = OTHER; note = bicyclic nucleic acid (BNA)
  modified_base 16..17: mod_base = OTHER; note = bicyclic nucleic acid (BNA)
  modified_base 2..3: mod_base = OTHER; note = 5-methyl
  modified_base 6: mod_base = OTHER; note = 5-methyl
  modified_base 9: mod_base = OTHER; note = 5-methyl
  source 1..17: mol_type = other DNA
tccaacatcaaggaaga

SEQ ID NO: 10534 - DNA, 16 bp, synthetic construct
  misc_feature 1..16: note = Description of Artificial Sequence: Synthetic Antisense oligonucleotide
  modified_base 1..2: mod_base = OTHER; note = bicyclic nucleic acid (BNA)
  modified_base 15..16: mod_base = OTHER; note = bicyclic nucleic acid (BNA)
  modified_base 2..3: mod_base = OTHER; note = 5-methyl
  modified_base 6: mod_base = OTHER; note = 5-methyl
  modified_base 9: mod_base = OTHER; note = 5-methyl
  source 1..16: mol_type = other DNA
tccaacatcaaggaag

SEQ ID NO: 10535 - DNA, 28 bp, synthetic construct
  misc_feature 1..28: note = Description of Artificial Sequence: Synthetic Antisense oligonucleotide
  modified_base 1..2: mod_base = OTHER; note = 5-methyl
  modified_base 5: mod_base = OTHER; note = 5-methyl
  modified_base 8: mod_base = OTHER; note = 5-methyl
  modified_base 20: mod_base = OTHER; note = 5-methyl
  modified_base 25: mod_base = OTHER; note = 5-methyl
  modified_base 1..2: mod_base = OTHER; note = bicyclic nucleic acid (BNA)
  modified_base 27..28: mod_base = OTHER; note = bicyclic nucleic acid (BNA)
  source 1..28: mol_type = other DNA
ccaacatcaaggaagatggcatttctag

SEQ ID NO: 10536 - DNA, 27 bp, synthetic construct
  misc_feature 1..27: note = Description of Artificial Sequence: Synthetic Antisense oligonucleotide
  modified_base 1..2: mod_base = OTHER; note = 5-methyl
  modified_base 5: mod_base = OTHER; note = 5-methyl
  modified_base 8: mod_base = OTHER; note = 5-methyl
  modified_base 20: mod_base = OTHER; note = 5-methyl
  modified_base 25: mod_base = OTHER; note = 5-methyl
  modified_base 1..2: mod_base = OTHER; note = bicyclic nucleic acid (BNA)
  modified_base 26..27: mod_base = OTHER; note = bicyclic nucleic acid (BNA)
  source 1..27: mol_type = other DNA
ccaacatcaaggaagatggcatttcta

SEQ ID NO: 10537 - DNA, 26 bp, synthetic construct
  misc_feature 1..26: note = Description of Artificial Sequence: Synthetic Antisense oligonucleotide
  modified_base 1..2: mod_base = OTHER; note = 5-methyl
  modified_base 5: mod_base = OTHER; note = 5-methyl
  modified_base 8: mod_base = OTHER; note = 5-methyl
  modified_base 20: mod_base = OTHER; note = 5-methyl
  modified_base 25: mod_base = OTHER; note = 5-methyl
  modified_base 1..2: mod_base = OTHER; note = bicyclic nucleic acid (BNA)
  modified_base 25..26: mod_base = OTHER; note = bicyclic nucleic acid (BNA)
  source 1..26: mol_type = other DNA
ccaacatcaaggaagatggcatttct

SEQ ID NO: 10538 - DNA, 25 bp, synthetic construct
  misc_feature 1..25: note = Description of Artificial Sequence: Synthetic Antisense oligonucleotide
  modified_base 1..2: mod_base = OTHER; note = 5-methyl
  modified_base 5: mod_base = OTHER; note = 5-methyl
  modified_base 8: mod_base = OTHER; note = 5-methyl
  modified_base 20: mod_base = OTHER; note = 5-methyl
  modified_base 25: mod_base = OTHER; note = 5-methyl
  modified_base 1..2: mod_base = OTHER; note = bicyclic nucleic acid (BNA)
  modified_base 24..25: mod_base = OTHER; note = bicyclic nucleic acid (BNA)
  source 1..25: mol_type = other DNA
ccaacatcaaggaagatggcatttc

SEQ ID NO: 10539 - DNA, 24 bp, synthetic construct
  misc_feature 1..24: note = Description of Artificial Sequence: Synthetic Antisense oligonucleotide
  modified_base 1..2: mod_base = OTHER; note = 5-methyl
  modified_base 5: mod_base = OTHER; note = 5-methyl
  modified_base 8: mod_base = OTHER; note = 5-methyl
  modified_base 20: mod_base = OTHER; note = 5-methyl
  modified_base 1..2: mod_base = OTHER; note = bicyclic nucleic acid (BNA)
  modified_base 23..24: mod_base = OTHER; note = bicyclic nucleic acid (BNA)
  source 1..24: mol_type = other DNA
ccaacatcaaggaagatggcattt

SEQ ID NO: 10540 - DNA, 23 bp, synthetic construct
  misc_feature 1..23: note = Description of Artificial Sequence: Synthetic Antisense oligonucleotide
  modified_base 1..2: mod_base = OTHER; note = 5-methyl
  modified_base 5: mod_base = OTHER; note = 5-methyl
  modified_base 8: mod_base = OTHER; note = 5-methyl
  modified_base 20: mod_base = OTHER; note = 5-methyl
  modified_base 1..2: mod_base = OTHER; note = bicyclic nucleic acid (BNA)
  modified_base 22..23: mod_base = OTHER; note = bicyclic nucleic acid (BNA)
  source 1..23: mol_type = other DNA
ccaacatcaaggaagatggcatt

SEQ ID NO: 10541 - DNA, 22 bp, synthetic construct
  misc_feature 1..22: note = Description of Artificial Sequence: Synthetic Antisense oligonucleotide
  modified_base 1..2: mod_base = OTHER; note = 5-methyl
  modified_base 5: mod_base = OTHER; note = 5-methyl
  modified_base 8: mod_base = OTHER; note = 5-methyl
  modified_base 20: mod_base = OTHER; note = 5-methyl
  modified_base 1..2: mod_base = OTHER; note = bicyclic nucleic acid (BNA)
  modified_base 21..22: mod_base = OTHER; note = bicyclic nucleic acid (BNA)
  source 1..22: mol_type = other DNA
ccaacatcaaggaagatggcat

SEQ ID NO: 10542 - DNA, 21 bp, synthetic construct
  misc_feature 1..21: note = Description of Artificial Sequence: Synthetic Antisense oligonucleotide
  modified_base 1..2: mod_base = OTHER; note = 5-methyl
  modified_base 5: mod_base = OTHER; note = 5-methyl
  modified_base 8: mod_base = OTHER; note = 5-methyl
  modified_base 20: mod_base = OTHER; note = 5-methyl
  modified_base 1..2: mod_base = OTHER; note = bicyclic nucleic acid (BNA)
  modified_base 20..21: mod_base = OTHER; note = bicyclic nucleic acid (BNA)
  source 1..21: mol_type = other DNA
ccaacatcaaggaagatggca

SEQ ID NO: 10543 - DNA, 20 bp, synthetic construct
  misc_feature 1..20: note = Description of Artificial Sequence: Synthetic Antisense oligonucleotide
  modified_base 1..2: mod_base = OTHER; note = 5-methyl
  modified_base 5: mod_base = OTHER; note = 5-methyl
  modified_base 8: mod_base = OTHER; note = 5-methyl
  modified_base 20: mod_base = OTHER; note = 5-methyl
  modified_base 1..2: mod_base = OTHER; note = bicyclic nucleic acid (BNA)
  modified_base 19..20: mod_base = OTHER; note = bicyclic nucleic acid (BNA)
  source 1..20: mol_type = other DNA
ccaacatcaaggaagatggc

SEQ ID NO: 10544 - DNA, 19 bp, synthetic construct
  misc_feature 1..19: note = Description of Artificial Sequence: Synthetic Antisense oligonucleotide
  modified_base 1..2: mod_base = OTHER; note = 5-methyl
  modified_base 5: mod_base = OTHER; note = 5-methyl
  modified_base 8: mod_base = OTHER; note = 5-methyl
  modified_base 1..2: mod_base = OTHER; note = bicyclic nucleic acid (BNA)
  modified_base 18..19: mod_base = OTHER; note = bicyclic nucleic acid (BNA)
  source 1..19: mol_type = other DNA
ccaacatcaaggaagatgg

SEQ ID NO: 10545 - DNA, 18 bp, synthetic construct
  misc_feature 1..18: note = Description of Artificial Sequence: Synthetic Antisense oligonucleotide
  modified_base 1..2: mod_base = OTHER; note = 5-methyl
  modified_base 5: mod_base = OTHER; note = 5-methyl
  modified_base 8: mod_base = OTHER; note = 5-methyl
  modified_base 1..2: mod_base = OTHER; note = bicyclic nucleic acid (BNA)
  modified_base 17..18: mod_base = OTHER; note = bicyclic nucleic acid (BNA)
  source 1..18: mol_type = other DNA
ccaacatcaaggaagatg

SEQ ID NO: 10546 - DNA, 17 bp, synthetic construct
  misc_feature 1..17: note = Description of Artificial Sequence: Synthetic Antisense oligonucleotide
  modified_base 1..2: mod_base = OTHER; note = 5-methyl
  modified_base 5: mod_base = OTHER; note = 5-methyl
  modified_base 8: mod_base = OTHER; note = 5-methyl
  modified_base 1..2: mod_base = OTHER; note = bicyclic nucleic acid (BNA)
  modified_base 16..17: mod_base = OTHER; note = bicyclic nucleic acid (BNA)
  source 1..17: mol_type = other DNA
ccaacatcaaggaagat

SEQ ID NO: 10547 - DNA, 16 bp, synthetic construct
  misc_feature 1..16: note = Description of Artificial Sequence: Synthetic Antisense oligonucleotide
  modified_base 1..2: mod_base = OTHER; note = 5-methyl
  modified_base 5: mod_base = OTHER; note = 5-methyl
  modified_base 8: mod_base = OTHER; note = 5-methyl
  modified_base 1..2: mod_base = OTHER; note = bicyclic nucleic acid (BNA)
  modified_base 15..16: mod_base = OTHER; note = bicyclic nucleic acid (BNA)
  source 1..16: mol_type = other DNA
ccaacatcaaggaaga

SEQ ID NO: 10548 - DNA, 15 bp, synthetic construct
  misc_feature 1..15: note = Description of Artificial Sequence: Synthetic Antisense oligonucleotide
  modified_base 1..2: mod_base = OTHER; note = 5-methyl
  modified_base 5: mod_base = OTHER; note = 5-methyl
  modified_base 8: mod_base = OTHER; note = 5-methyl
  modified_base 1..2: mod_base = OTHER; note = bicyclic nucleic acid (BNA)
  modified_base 14..15: mod_base = OTHER; note = bicyclic nucleic acid (BNA)
  source 1..15: mol_type = other DNA
ccaacatcaaggaag

SEQ ID NO: 10549 - DNA, 27 bp, synthetic construct
  misc_feature 1..27: note = Description of Artificial Sequence: Synthetic Antisense oligonucleotide
  modified_base 1: mod_base = OTHER; note = 5-methyl
  modified_base 4: mod_base = OTHER; note = 5-methyl
  modified_base 7: mod_base = OTHER; note = 5-methyl
  modified_base 19: mod_base = OTHER; note = 5-methyl
  modified_base 24: mod_base = OTHER; note = 5-methyl
  modified_base 1..2: mod_base = OTHER; note = bicyclic nucleic acid (BNA)
  modified_base 26..27: mod_base = OTHER; note = bicyclic nucleic acid (BNA)
  source 1..27: mol_type = other DNA
caacatcaaggaagatggcatttctag

SEQ ID NO: 10550 - DNA, 26 bp, synthetic construct
  misc_feature 1..26: note = Description of Artificial Sequence: Synthetic Antisense oligonucleotide
  modified_base 1: mod_base = OTHER; note = 5-methyl
  modified_base 4: mod_base = OTHER; note = 5-methyl
  modified_base 7: mod_base = OTHER; note = 5-methyl
  modified_base 19: mod_base = OTHER; note = 5-methyl
  modified_base 24: mod_base = OTHER; note = 5-methyl
  modified_base 1..2: mod_base = OTHER; note = bicyclic nucleic acid (BNA)
  modified_base 25..26: mod_base = OTHER; note = bicyclic nucleic acid (BNA)
  source 1..26: mol_type = other DNA
caacatcaaggaagatggcatttcta

SEQ ID NO: 10551 - DNA, 25 bp, synthetic construct
  misc_feature 1..25: note = Description of Artificial Sequence: Synthetic Antisense oligonucleotide
  modified_base 1: mod_base = OTHER; note = 5-methyl
  modified_base 4: mod_base = OTHER; note = 5-methyl
  modified_base 7: mod_base = OTHER; note = 5-methyl
  modified_base 19: mod_base = OTHER; note = 5-methyl
  modified_base 24: mod_base = OTHER; note = 5-methyl
  modified_base 1..2: mod_base = OTHER; note = bicyclic nucleic acid (BNA)
  modified_base 24..25: mod_base = OTHER; note = bicyclic nucleic acid (BNA)
  source 1..25: mol_type = other DNA
caacatcaaggaagatggcatttct

SEQ ID NO: 10552 - DNA, 24 bp, synthetic construct
  misc_feature 1..24: note = Description of Artificial Sequence: Synthetic Antisense oligonucleotide
  modified_base 1: mod_base = OTHER; note = 5-methyl
  modified_base 4: mod_base = OTHER; note = 5-methyl
  modified_base 7: mod_base = OTHER; note = 5-methyl
  modified_base 19: mod_base = OTHER; note = 5-methyl
  modified_base 24: mod_base = OTHER; note = 5-methyl
  modified_base 1..2: mod_base = OTHER; note = bicyclic nucleic acid (BNA)
  modified_base 23..24: mod_base = OTHER; note = bicyclic nucleic acid (BNA)
  source 1..24: mol_type = other DNA
caacatcaaggaagatggcatttc

SEQ ID NO: 10553 - DNA, 23 bp, synthetic construct
  misc_feature 1..23: note = Description of Artificial Sequence: Synthetic Antisense oligonucleotide
  modified_base 1: mod_base = OTHER; note = 5-methyl
  modified_base 4: mod_base = OTHER; note = 5-methyl
  modified_base 7: mod_base = OTHER; note = 5-methyl
  modified_base 19: mod_base = OTHER; note = 5-methyl
  modified_base 1..2: mod_base = OTHER; note = bicyclic nucleic acid (BNA)
  modified_base 22..23: mod_base = OTHER; note = bicyclic nucleic acid (BNA)
  source 1..23: mol_type = other DNA
caacatcaaggaagatggcattt

SEQ ID NO: 10554 - DNA, 22 bp, synthetic construct
  misc_feature 1..22: note = Description of Artificial Sequence: Synthetic Antisense oligonucleotide
  modified_base 1: mod_base = OTHER; note = 5-methyl
  modified_base 4: mod_base = OTHER; note = 5-methyl
  modified_base 7: mod_base = OTHER; note = 5-methyl
  modified_base 19: mod_base = OTHER; note = 5-methyl
  modified_base 1..2: mod_base = OTHER; note = bicyclic nucleic acid (BNA)
  modified_base 21..22: mod_base = OTHER; note = bicyclic nucleic acid (BNA)
  source 1..22: mol_type = other DNA
caacatcaaggaagatggcatt

SEQ ID NO: 10555 - DNA, 21 bp, synthetic construct
  misc_feature 1..21: note = Description of Artificial Sequence: Synthetic Antisense oligonucleotide
  modified_base 1: mod_base = OTHER; note = 5-methyl
  modified_base 4: mod_base = OTHER; note = 5-methyl
  modified_base 7: mod_base = OTHER; note = 5-methyl
  modified_base 19: mod_base = OTHER; note = 5-methyl
  modified_base 1..2: mod_base = OTHER; note = bicyclic nucleic acid (BNA)
  modified_base 20..21: mod_base = OTHER; note = bicyclic nucleic acid (BNA)
  source 1..21: mol_type = other DNA
caacatcaaggaagatggcat

SEQ ID NO: 10556 - DNA, 20 bp, synthetic construct
  misc_feature 1..20: note = Description of Artificial Sequence: Synthetic Antisense oligonucleotide
  modified_base 1: mod_base = OTHER; note = 5-methyl
  modified_base 4: mod_base = OTHER; note = 5-methyl
  modified_base 7: mod_base = OTHER; note = 5-methyl
  modified_base 19: mod_base = OTHER; note = 5-methyl
  modified_base 1..2: mod_base = OTHER; note = bicyclic nucleic acid (BNA)
  modified_base 19..20: mod_base = OTHER; note = bicyclic nucleic acid (BNA)
  source 1..20: mol_type = other DNA
caacatcaaggaagatggca

SEQ ID NO: 10557 - DNA, 19 bp, synthetic construct
  misc_feature 1..19: note = Description of Artificial Sequence: Synthetic Antisense oligonucleotide
  modified_base 1: mod_base = OTHER; note = 5-methyl
  modified_base 4: mod_base = OTHER; note = 5-methyl
  modified_base 7: mod_base = OTHER; note = 5-methyl
  modified_base 19: mod_base = OTHER; note = 5-methyl
  modified_base 1..2: mod_base = OTHER; note = bicyclic nucleic acid (BNA)
  modified_base 18..19: mod_base = OTHER; note = bicyclic nucleic acid (BNA)
  source 1..19: mol_type = other DNA
caacatcaaggaagatggc

SEQ ID NO: 10558 - DNA, 18 bp, synthetic construct
  misc_feature 1..18: note = Description of Artificial Sequence: Synthetic Antisense oligonucleotide
  modified_base 1: mod_base = OTHER; note = 5-methyl
  modified_base 4: mod_base = OTHER; note = 5-methyl
  modified_base 7: mod_base = OTHER; note = 5-methyl
  modified_base 1..2: mod_base = OTHER; note = bicyclic nucleic acid (BNA)
  modified_base 17..18: mod_base = OTHER; note = bicyclic nucleic acid (BNA)
  source 1..18: mol_type = other DNA
caacatcaaggaagatgg

SEQ ID NO: 10559 - DNA, 17 bp, synthetic construct
  misc_feature 1..17: note = Description of Artificial Sequence: Synthetic Antisense oligonucleotide
  modified_base 1: mod_base = OTHER; note = 5-methyl
  modified_base 4: mod_base = OTHER; note = 5-methyl
  modified_base 7: mod_base = OTHER; note = 5-methyl
  modified_base 1..2: mod_base = OTHER; note = bicyclic nucleic acid (BNA)
  modified_base 16..17: mod_base = OTHER; note = bicyclic nucleic acid (BNA)
  source 1..17: mol_type = other DNA
caacatcaaggaagatg

SEQ ID NO: 10560 - DNA, 16 bp, synthetic construct
  misc_feature 1..16: note = Description of Artificial Sequence: Synthetic Antisense oligonucleotide
  modified_base 1: mod_base = OTHER; note = 5-methyl
  modified_base 4: mod_base = OTHER; note = 5-methyl
  modified_base 7: mod_base = OTHER; note = 5-methyl
  modified_base 1..2: mod_base = OTHER; note = bicyclic nucleic acid (BNA)
  modified_base 15..16: mod_base = OTHER; note = bicyclic nucleic acid (BNA)
  source 1..16: mol_type = other DNA
caacatcaaggaagat

SEQ ID NO: 10561 - DNA, 15 bp, synthetic construct
  misc_feature 1..15: note = Description of Artificial Sequence: Synthetic Antisense oligonucleotide
  modified_base 1: mod_base = OTHER; note = 5-methyl
  modified_base 4: mod_base = OTHER; note = 5-methyl
  modified_base 7: mod_base = OTHER; note = 5-methyl
  modified_base 1..2: mod_base = OTHER; note = bicyclic nucleic acid (BNA)
  modified_base 14..15: mod_base = OTHER; note = bicyclic nucleic acid (BNA)
  source 1..15: mol_type = other DNA
caacatcaaggaaga

SEQ ID NO: 10562 - DNA, 14 bp, synthetic construct
  misc_feature 1..14: note = Description of Artificial Sequence: Synthetic Antisense oligonucleotide
  modified_base 1: mod_base = OTHER; note = 5-methyl
  modified_base 4: mod_base = OTHER; note = 5-methyl
  modified_base 7: mod_base = OTHER; note = 5-methyl
  modified_base 1..2: mod_base = OTHER; note = bicyclic nucleic acid (BNA)
  modified_base 13..14: mod_base = OTHER; note = bicyclic nucleic acid (BNA)
  source 1..14: mol_type = other DNA
caacatcaaggaag

SEQ ID NO: 10563 - DNA, 26 bp, synthetic construct
  misc_feature 1..26: note = Description of Artificial Sequence: Synthetic Antisense oligonucleotide
  modified_base 1..2: mod_base = OTHER; note = bicyclic nucleic acid (BNA)
  modified_base 25..26: mod_base = OTHER; note = bicyclic nucleic acid (BNA)
  modified_base 3: mod_base = OTHER; note = 5-methyl
  modified_base 6: mod_base = OTHER; note = 5-methyl
  modified_base 18: mod_base = OTHER; note = 5-methyl
  modified_base 23: mod_base = OTHER; note = 5-methyl
  source 1..26: mol_type = other DNA
aacatcaaggaagatggcatttctag

SEQ ID NO: 10564 - DNA, 25 bp, synthetic construct
  misc_feature 1..25: note = Description of Artificial Sequence: Synthetic Antisense oligonucleotide
  modified_base 1..2: mod_base = OTHER; note = bicyclic nucleic acid (BNA)
  modified_base 24..25: mod_base = OTHER; note = bicyclic nucleic acid (BNA)
  modified_base 3: mod_base = OTHER; note = 5-methyl
  modified_base 6: mod_base = OTHER; note = 5-methyl
  modified_base 18: mod_base = OTHER; note = 5-methyl
  modified_base 23: mod_base = OTHER; note = 5-methyl
  source 1..25: mol_type = other DNA
aacatcaaggaagatggcatttcta

SEQ ID NO: 10565 - DNA, 24 bp, synthetic construct
  misc_feature 1..24: note = Description of Artificial Sequence: Synthetic Antisense oligonucleotide
  modified_base 1..2: mod_base = OTHER; note = bicyclic nucleic acid (BNA)
  modified_base 23..24: mod_base = OTHER; note = bicyclic nucleic acid (BNA)
  modified_base 3: mod_base = OTHER; note = 5-methyl
  modified_base 6: mod_base = OTHER; note = 5-methyl
  modified_base 18: mod_base = OTHER; note = 5-methyl
  modified_base 23: mod_base = OTHER; note = 5-methyl
  source 1..24: mol_type = other DNA
aacatcaaggaagatggcatttct

SEQ ID NO: 10566 - DNA, 23 bp, synthetic construct
  misc_feature 1..23: note = Description of Artificial Sequence: Synthetic Antisense oligonucleotide
  modified_base 1..2: mod_base = OTHER; note = bicyclic nucleic acid (BNA)
  modified_base 22..23: mod_base = OTHER; note = bicyclic nucleic acid (BNA)
  modified_base 3: mod_base = OTHER; note = 5-methyl
  modified_base 6: mod_base = OTHER; note = 5-methyl
  modified_base 18: mod_base = OTHER; note = 5-methyl
  modified_base 23: mod_base = OTHER; note = 5-methyl
  source 1..23: mol_type = other DNA
aacatcaaggaagatggcatttc

SEQ ID NO: 10567 - DNA, 22 bp, synthetic construct
  misc_feature 1..22: note = Description of Artificial Sequence: Synthetic Antisense oligonucleotide
  modified_base 1..2: mod_base = OTHER; note = bicyclic nucleic acid (BNA)
  modified_base 21..22: mod_base = OTHER; note = bicyclic nucleic acid (BNA)
  modified_base 3: mod_base = OTHER; note = 5-methyl
  modified_base 6: mod_base = OTHER; note = 5-methyl
  modified_base 18: mod_base = OTHER; note = 5-methyl
  source 1..22: mol_type = other DNA
aacatcaaggaagatggcattt

SEQ ID NO: 10568 - DNA, 21 bp, synthetic construct
  misc_feature 1..21: note = Description of Artificial Sequence: Synthetic Antisense oligonucleotide
  modified_base 1..2: mod_base = OTHER; note = bicyclic nucleic acid (BNA)
  modified_base 20..21: mod_base = OTHER; note = bicyclic nucleic acid (BNA)
  modified_base 3: mod_base = OTHER; note = 5-methyl
  modified_base 6: mod_base = OTHER; note = 5-methyl
  modified_base 18: mod_base = OTHER; note = 5-methyl
  source 1..21: mol_type = other DNA
aacatcaaggaagatggcatt

SEQ ID NO: 10569 - DNA, 20 bp, synthetic construct
  misc_feature 1..20: note = Description of Artificial Sequence: Synthetic Antisense oligonucleotide
  modified_base 1..2: mod_base = OTHER; note = bicyclic nucleic acid (BNA)
  modified_base 19..20: mod_base = OTHER; note = bicyclic nucleic acid (BNA)
  modified_base 3: mod_base = OTHER; note = 5-methyl
  modified_base 6: mod_base = OTHER; note = 5-methyl
  modified_base 18: mod_base = OTHER; note = 5-methyl
  source 1..20: mol_type = other DNA
aacatcaaggaagatggcat

SEQ ID NO: 10570 - DNA, 19 bp, synthetic construct
  misc_feature 1..19: note = Description of Artificial Sequence: Synthetic Antisense oligonucleotide
  modified_base 1..2: mod_base = OTHER; note = bicyclic nucleic acid (BNA)
  modified_base 18..19: mod_base = OTHER; note = bicyclic nucleic acid (BNA)
  modified_base 3: mod_base = OTHER; note = 5-methyl
  modified_base 6: mod_base = OTHER; note = 5-methyl
  modified_base 18: mod_base = OTHER; note = 5-methyl
  source 1..19: mol_type = other DNA
aacatcaaggaagatggca

SEQ ID NO: 10571 - DNA, 18 bp, synthetic construct
  misc_feature 1..18: note = Description of Artificial Sequence: Synthetic Antisense oligonucleotide
  modified_base 1..2: mod_base = OTHER; note = bicyclic nucleic acid (BNA)
  modified_base 17..18: mod_base = OTHER; note = bicyclic nucleic acid (BNA)
  modified_base 3: mod_base = OTHER; note = 5-methyl
  modified_base 6: mod_base = OTHER; note = 5-methyl
  modified_base 18: mod_base = OTHER; note = 5-methyl
  source 1..18: mol_type = other DNA
aacatcaaggaagatggc

SEQ ID NO: 10572 - DNA, 17 bp, synthetic construct
  misc_feature 1..17: note = Description of Artificial Sequence: Synthetic Antisense oligonucleotide
  modified_base 1..2: mod_base = OTHER; note = bicyclic nucleic acid (BNA)
  modified_base 16..17: mod_base = OTHER; note = bicyclic nucleic acid (BNA)
  modified_base 3: mod_base = OTHER; note = 5-methyl
  modified_base 6: mod_base = OTHER; note = 5-methyl
  source 1..17: mol_type = other DNA
aacatcaaggaagatgg

SEQ ID NO: 10573 - DNA, 16 bp, synthetic construct
  misc_feature 1..16: note = Description of Artificial Sequence: Synthetic Antisense oligonucleotide
  modified_base 1..2: mod_base = OTHER; note = bicyclic nucleic acid (BNA)
  modified_base 15..16: mod_base = OTHER; note = bicyclic nucleic acid (BNA)
  modified_base 3: mod_base = OTHER; note = 5-methyl
  modified_base 6: mod_base = OTHER; note = 5-methyl
  source 1..16: mol_type = other DNA
aacatcaaggaagatg

SEQ ID NO: 10574 - DNA, 15 bp, synthetic construct
  misc_feature 1..15: note = Description of Artificial Sequence: Synthetic Antisense oligonucleotide
  modified_base 1..2: mod_base = OTHER; note = bicyclic nucleic acid (BNA)
  modified_base 14..15: mod_base = OTHER; note = bicyclic nucleic acid (BNA)
  modified_base 3: mod_base = OTHER; note = 5-methyl
  modified_base 6: mod_base = OTHER; note = 5-methyl
  source 1..15: mol_type = other DNA
aacatcaaggaagat

SEQ ID NO: 10575 - DNA, 14 bp, synthetic construct
  misc_feature 1..14: note = Description of Artificial Sequence: Synthetic Antisense oligonucleotide
  modified_base 1..2: mod_base = OTHER; note = bicyclic nucleic acid (BNA)
  modified_base 13..14: mod_base = OTHER; note = bicyclic nucleic acid (BNA)
  modified_base 3: mod_base = OTHER; note = 5-methyl
  modified_base 6: mod_base = OTHER; note = 5-methyl
  source 1..14: mol_type = other DNA
aacatcaaggaaga

SEQ ID NO: 10576 - DNA, 13 bp, synthetic construct
  misc_feature 1..13: note = Description of Artificial Sequence: Synthetic Antisense oligonucleotide
  modified_base 1..2: mod_base = OTHER; note = bicyclic nucleic acid (BNA)
  modified_base 12..13: mod_base = OTHER; note = bicyclic nucleic acid (BNA)
  modified_base 3: mod_base = OTHER; note = 5-methyl
  modified_base 6: mod_base = OTHER; note = 5-methyl
  source 1..13: mol_type = other DNA
aacatcaaggaag

SEQ ID NO: 10577 - DNA, 25 bp, synthetic construct
  misc_feature 1..25: note = Description of Artificial Sequence: Synthetic Antisense oligonucleotide
  modified_base 1..2: mod_base = OTHER; note = bicyclic nucleic acid (BNA)
  modified_base 24..25: mod_base = OTHER; note = bicyclic nucleic acid (BNA)
  modified_base 2: mod_base = OTHER; note = 5-methyl
  modified_base 5: mod_base = OTHER; note = 5-methyl
  modified_base 17: mod_base = OTHER; note = 5-methyl
  modified_base 22: mod_base = OTHER; note = 5-methyl
  source 1..25: mol_type = other DNA
acatcaaggaagatggcatttctag

SEQ ID NO: 10578 - DNA, 24 bp, synthetic construct
  misc_feature 1..24: note = Description of Artificial Sequence: Synthetic Antisense oligonucleotide
  modified_base 1..2: mod_base = OTHER; note = bicyclic nucleic acid (BNA)
  modified_base 23..24: mod_base = OTHER; note = bicyclic nucleic acid (BNA)
  modified_base 2: mod_base = OTHER; note = 5-methyl
  modified_base 5: mod_base = OTHER; note = 5-methyl
  modified_base 17: mod_base = OTHER; note = 5-methyl
  modified_base 22: mod_base = OTHER; note = 5-methyl
  source 1..24: mol_type = other DNA
acatcaaggaagatggcatttcta

SEQ ID NO: 10579 - DNA, 23 bp, synthetic construct
  misc_feature 1..23: note = Description of Artificial Sequence: Synthetic Antisense oligonucleotide
  modified_base 1..2: mod_base = OTHER; note = bicyclic nucleic acid (BNA)
  modified_base 22..23: mod_base = OTHER; note = bicyclic nucleic acid (BNA)
  modified_base 2: mod_base = OTHER; note = 5-methyl
  modified_base 5: mod_base = OTHER; note = 5-methyl
  modified_base 17: mod_base = OTHER; note = 5-methyl
  modified_base 22: mod_base = OTHER; note = 5-methyl
  source 1..23: mol_type = other DNA
acatcaaggaagatggcatttct

SEQ ID NO: 10580 - DNA, 22 bp, synthetic construct
  misc_feature 1..22: note = Description of Artificial Sequence: Synthetic Antisense oligonucleotide
  modified_base 1..2: mod_base = OTHER; note = bicyclic nucleic acid (BNA)
  modified_base 21..22: mod_base = OTHER; note = bicyclic nucleic acid (BNA)
  modified_base 2: mod_base = OTHER; note = 5-methyl
  modified_base 5: mod_base = OTHER; note = 5-methyl
  modified_base 17: mod_base = OTHER; note = 5-methyl
  modified_base 22: mod_base = OTHER; note = 5-methyl
  source 1..22: mol_type = other DNA
acatcaaggaagatggcatttc

SEQ ID NO: 10581 - DNA, 21 bp, synthetic construct
  misc_feature 1..21: note = Description of Artificial Sequence: Synthetic Antisense oligonucleotide
  modified_base 1..2: mod_base = OTHER; note = bicyclic nucleic acid (BNA)
  modified_base 20..21: mod_base = OTHER; note = bicyclic nucleic acid (BNA)
  modified_base 2: mod_base = OTHER; note = 5-methyl
  modified_base 5: mod_base = OTHER; note = 5-methyl
  modified_base 17: mod_base = OTHER; note = 5-methyl
  source 1..21: mol_type = other DNA
acatcaaggaagatggcattt

SEQ ID NO: 10582 - DNA, 20 bp, synthetic construct
  misc_feature 1..20: note = Description of Artificial Sequence: Synthetic Antisense oligonucleotide
  modified_base 1..2: mod_base = OTHER; note = bicyclic nucleic acid (BNA)
  modified_base 19..20: mod_base = OTHER; note = bicyclic nucleic acid (BNA)
  modified_base 2: mod_base = OTHER; note = 5-methyl
  modified_base 5: mod_base = OTHER; note = 5-methyl
  modified_base 17: mod_base = OTHER; note = 5-methyl
  source 1..20: mol_type = other DNA
acatcaaggaagatggcatt

SEQ ID NO: 10583 - DNA, 19 bp, synthetic construct
  misc_feature 1..19: note = Description of Artificial Sequence: Synthetic Antisense oligonucleotide
  modified_base 1..2: mod_base = OTHER; note = bicyclic nucleic acid (BNA)
  modified_base 18..19: mod_base = OTHER; note = bicyclic nucleic acid (BNA)
  modified_base 2: mod_base = OTHER; note = 5-methyl
  modified_base 5: mod_base = OTHER; note = 5-methyl
  modified_base 17: mod_base = OTHER; note = 5-methyl
  source 1..19: mol_type = other DNA
acatcaaggaagatggcat

SEQ ID NO: 10584 - DNA, 18 bp, synthetic construct
  misc_feature 1..18: note = Description of Artificial Sequence: Synthetic Antisense oligonucleotide
  modified_base 1..2: mod_base = OTHER; note = bicyclic nucleic acid (BNA)
  modified_base 17..18: mod_base = OTHER; note = bicyclic nucleic acid (BNA)
  modified_base 2: mod_base = OTHER; note = 5-methyl
  modified_base 5: mod_base = OTHER; note = 5-methyl
  modified_base 17: mod_base = OTHER; note = 5-methyl
  source 1..18: mol_type = other DNA
acatcaaggaagatggca

SEQ ID NO: 10585 - DNA, 17 bp, synthetic construct
  misc_feature 1..17: note = Description of Artificial Sequence: Synthetic Antisense oligonucleotide
  modified_base 1..2: mod_base = OTHER; note = bicyclic nucleic acid (BNA)
  modified_base 16..17: mod_base = OTHER; note = bicyclic nucleic acid (BNA)
  modified_base 2: mod_base = OTHER; note = 5-methyl
  modified_base 5: mod_base = OTHER; note = 5-methyl
  modified_base 17: mod_base = OTHER; note = 5-methyl
  source 1..17: mol_type = other DNA
acatcaaggaagatggc

SEQ ID NO: 10586 - DNA, 16 bp, synthetic construct
  misc_feature 1..16: note = Description of Artificial Sequence: Synthetic Antisense oligonucleotide
  modified_base 1..2: mod_base = OTHER; note = bicyclic nucleic acid (BNA)
  modified_base 15..16: mod_base = OTHER; note = bicyclic nucleic acid (BNA)
  modified_base 2: mod_base = OTHER; note = 5-methyl
  modified_base 5: mod_base = OTHER; note = 5-methyl
  source 1..16: mol_type = other DNA
acatcaaggaagatgg

SEQ ID NO: 10587 - DNA, 15 bp, synthetic construct
  misc_feature 1..15: note = Description of Artificial Sequence: Synthetic Antisense oligonucleotide
  modified_base 1..2: mod_base = OTHER; note = bicyclic nucleic acid (BNA)
  modified_base 14..15: mod_base = OTHER; note = bicyclic nucleic acid (BNA)
  modified_base 2: mod_base = OTHER; note = 5-methyl
  modified_base 5: mod_base = OTHER; note = 5-methyl
  source 1..15: mol_type = other DNA
acatcaaggaagatg

SEQ ID NO: 10588 - DNA, 14 bp, synthetic construct
  misc_feature 1..14: note = Description of Artificial Sequence: Synthetic Antisense oligonucleotide
  modified_base 1..2: mod_base = OTHER; note = bicyclic nucleic acid (BNA)
  modified_base 13..14: mod_base = OTHER; note = bicyclic nucleic acid (BNA)
  modified_base 2: mod_base = OTHER; note = 5-methyl
  modified_base 5: mod_base = OTHER; note = 5-methyl
  source 1..14: mol_type = other DNA
acatcaaggaagat

SEQ ID NO: 10589 - DNA, 13 bp, synthetic construct
  misc_feature 1..13: note = Description of Artificial Sequence: Synthetic Antisense oligonucleotide
  modified_base 1..2: mod_base = OTHER; note = bicyclic nucleic acid (BNA)
  modified_base 12..13: mod_base = OTHER; note = bicyclic nucleic acid (BNA)
  modified_base 2: mod_base = OTHER; note = 5-methyl
  modified_base 5: mod_base = OTHER; note = 5-methyl
  source 1..13: mol_type = other DNA
acatcaaggaaga

SEQ ID NO: 10590 - DNA, 12 bp, synthetic construct
  misc_feature 1..12: note = Description of Artificial Sequence: Synthetic Antisense oligonucleotide
  modified_base 1..2: mod_base = OTHER; note = bicyclic nucleic acid (BNA)
  modified_base 11..12: mod_base = OTHER; note = bicyclic nucleic acid (BNA)
  modified_base 2: mod_base = OTHER; note = 5-methyl
  modified_base 5: mod_base = OTHER; note = 5-methyl
  source 1..12: mol_type = other DNA
acatcaaggaag

SEQ ID NO: 10591 - DNA, 24 bp, synthetic construct
  misc_feature 1..24: note = Description of Artificial Sequence: Synthetic Antisense oligonucleotide
  modified_base 1: mod_base = OTHER; note = 5-methyl
  modified_base 4: mod_base = OTHER; note = 5-methyl
  modified_base 16: mod_base = OTHER; note = 5-methyl
  modified_base 21: mod_base = OTHER; note = 5-methyl
  modified_base 1..2: mod_base = OTHER; note = bicyclic nucleic acid (BNA)
  modified_base 23..24: mod_base = OTHER; note = bicyclic nucleic acid (BNA)
  source 1..24: mol_type = other DNA
catcaaggaagatggcatttctag

SEQ ID NO: 10592 - DNA, 23 bp, synthetic construct
  misc_feature 1..23: note = Description of Artificial Sequence: Synthetic Antisense oligonucleotide
  modified_base 1: mod_base = OTHER; note = 5-methyl
  modified_base 4: mod_base = OTHER; note = 5-methyl
  modified_base 16: mod_base = OTHER; note = 5-methyl
  modified_base 21: mod_base = OTHER; note = 5-methyl
  modified_base 1..2: mod_base = OTHER; note = bicyclic nucleic acid (BNA)
  modified_base 22..23: mod_base = OTHER; note = bicyclic nucleic acid (BNA)
  source 1..23: mol_type = other DNA
catcaaggaagatggcatttcta

SEQ ID NO: 10593 - DNA, 22 bp, synthetic construct
  misc_feature 1..22: note = Description of Artificial Sequence: Synthetic Antisense oligonucleotide
  modified_base 1: mod_base = OTHER; note = 5-methyl
  modified_base 4: mod_base = OTHER; note = 5-methyl
  modified_base 16: mod_base = OTHER; note = 5-methyl
  modified_base 21: mod_base = OTHER; note = 5-methyl
  modified_base 1..2: mod_base = OTHER; note = bicyclic nucleic acid (BNA)
  modified_base 21..22: mod_base = OTHER; note = bicyclic nucleic acid (BNA)
  source 1..22: mol_type = other DNA
catcaaggaagatggcatttct

SEQ ID NO: 10594 - DNA, 21 bp, synthetic construct
  misc_feature 1..21: note = Description of Artificial Sequence: Synthetic Antisense oligonucleotide
  modified_base 1: mod_base = OTHER; note = 5-methyl
  modified_base 4: mod_base = OTHER; note = 5-methyl
  modified_base 16: mod_base = OTHER; note = 5-methyl
  modified_base 21: mod_base = OTHER; note = 5-methyl
  modified_base 1..2: mod_base = OTHER; note = bicyclic nucleic acid (BNA)
  modified_base 20..21: mod_base = OTHER; note = bicyclic nucleic acid (BNA)
  source 1..21: mol_type = other DNA
catcaaggaagatggcatttc

SEQ ID NO: 10595 - DNA, 20 bp, synthetic construct
  misc_feature 1..20: note = Description of Artificial Sequence: Synthetic Antisense oligonucleotide
  modified_base 1: mod_base = OTHER; note = 5-methyl
  modified_base 4: mod_base = OTHER; note = 5-methyl
  modified_base 16: mod_base = OTHER; note = 5-methyl
  modified_base 1..2: mod_base = OTHER; note = bicyclic nucleic acid (BNA)
  modified_base 19..20: mod_base = OTHER; note = bicyclic nucleic acid (BNA)
  source 1..20: mol_type = other DNA
catcaaggaagatggcattt

SEQ ID NO: 10596 - DNA, 19 bp, synthetic construct
  misc_feature 1..19: note = Description of Artificial Sequence: Synthetic Antisense oligonucleotide
  modified_base 1: mod_base = OTHER; note = 5-methyl
  modified_base 4: mod_base = OTHER; note = 5-methyl
  modified_base 16: mod_base = OTHER; note = 5-methyl
  modified_base 1..2: mod_base = OTHER; note = bicyclic nucleic acid (BNA)
  modified_base 18..19: mod_base = OTHER; note = bicyclic nucleic acid (BNA)
  source 1..19: mol_type = other DNA
catcaaggaagatggcatt

SEQ ID NO: 10597 - DNA, 18 bp, synthetic construct
  misc_feature 1..18: note = Description of Artificial Sequence: Synthetic Antisense oligonucleotide
  modified_base 1: mod_base = OTHER; note = 5-methyl
  modified_base 4: mod_base = OTHER; note = 5-methyl
  modified_base 16: mod_base = OTHER; note = 5-methyl
  modified_base 1..2: mod_base = OTHER; note = bicyclic nucleic acid (BNA)
  modified_base 17..18: mod_base = OTHER; note = bicyclic nucleic acid (BNA)
  source 1..18: mol_type = other DNA
catcaaggaagatggcat

SEQ ID NO: 10598 - DNA, 17 bp, synthetic construct
  misc_feature 1..17: note = Description of Artificial Sequence: Synthetic Antisense oligonucleotide
  modified_base 1: mod_base = OTHER; note = 5-methyl
  modified_base 4: mod_base = OTHER; note = 5-methyl
  modified_base 16: mod_base = OTHER; note = 5-methyl
  modified_base 1..2: mod_base = OTHER; note = bicyclic nucleic acid (BNA)
  modified_base 16..17: mod_base = OTHER; note = bicyclic nucleic acid (BNA)
  source 1..17: mol_type = other DNA
catcaaggaagatggca

SEQ ID NO: 10599 - DNA, 16 bp, synthetic construct
  misc_feature 1..16: note = Description of Artificial Sequence: Synthetic Antisense oligonucleotide
  modified_base 1: mod_base = OTHER; note = 5-methyl
  modified_base 4: mod_base = OTHER; note = 5-methyl
  modified_base 16: mod_base = OTHER; note = 5-methyl
  modified_base 1..2: mod_base = OTHER; note = bicyclic nucleic acid (BNA)
  modified_base 15..16: mod_base = OTHER; note = bicyclic nucleic acid (BNA)
  source 1..16: mol_type = other DNA
catcaaggaagatggc

SEQ ID NO: 10600 - DNA, 15 bp, synthetic construct
  misc_feature 1..15: note = Description of Artificial Sequence: Synthetic Antisense oligonucleotide
  modified_base 1: mod_base = OTHER; note = 5-methyl
  modified_base 4: mod_base = OTHER; note = 5-methyl
  modified_base 1..2: mod_base = OTHER; note = bicyclic nucleic acid (BNA)
  modified_base 14..15: mod_base = OTHER; note = bicyclic nucleic acid (BNA)
  source 1..15: mol_type = other DNA
catcaaggaagatgg

SEQ ID NO: 10601 - DNA, 14 bp, synthetic construct
  misc_feature 1..14: note = Description of Artificial Sequence: Synthetic Antisense oligonucleotide
  modified_base 1: mod_base = OTHER; note = 5-methyl
  modified_base 4: mod_base = OTHER; note = 5-methyl
  modified_base 1..2: mod_base = OTHER; note = bicyclic nucleic acid (BNA)
  modified_base 13..14: mod_base = OTHER; note = bicyclic nucleic acid (BNA)
  source 1..14: mol_type = other DNA
catcaaggaagatg

SEQ ID NO: 10602 - DNA, 13 bp, synthetic construct
  misc_feature 1..13: note = Description of Artificial Sequence: Synthetic Antisense oligonucleotide
  modified_base 1: mod_base = OTHER; note = 5-methyl
  modified_base 4: mod_base = OTHER; note = 5-methyl
  modified_base 1..2: mod_base = OTHER; note = bicyclic nucleic acid (BNA)
  modified_base 12..13: mod_base = OTHER; note = bicyclic nucleic acid (BNA)
  source 1..13: mol_type = other DNA
catcaaggaagat

SEQ ID NO: 10603 - DNA, 12 bp, synthetic construct
  misc_feature 1..12: note = Description of Artificial Sequence: Synthetic Antisense oligonucleotide
  modified_base 1: mod_base = OTHER; note = 5-methyl
  modified_base 4: mod_base = OTHER; note = 5-methyl
  modified_base 1..2: mod_base = OTHER; note = bicyclic nucleic acid (BNA)
  modified_base 11..12: mod_base = OTHER; note = bicyclic nucleic acid (BNA)
  source 1..12: mol_type = other DNA
catcaaggaaga

SEQ ID NO: 10604 - DNA, 11 bp, synthetic construct
  misc_feature 1..11: note = Description of Artificial Sequence: Synthetic Antisense oligonucleotide
  modified_base 1: mod_base = OTHER; note = 5-methyl
  modified_base 4: mod_base = OTHER; note = 5-methyl
  modified_base 1..2: mod_base = OTHER; note = bicyclic nucleic acid (BNA)
  modified_base 10..11: mod_base = OTHER; note = bicyclic nucleic acid (BNA)
  source 1..11: mol_type = other DNA
catcaaggaag

SEQ ID NO: 10605 - DNA, 23 bp, synthetic construct
  misc_feature 1..23: note = Description of Artificial Sequence: Synthetic Antisense oligonucleotide
  modified_base 1..2: mod_base = OTHER; note = bicyclic nucleic acid (BNA)
  modified_base 22..23: mod_base = OTHER; note = bicyclic nucleic acid (BNA)
  modified_base 3: mod_base = OTHER; note = 5-methyl
  modified_base 15: mod_base = OTHER; note = 5-methyl
  modified_base 20: mod_base = OTHER; note = 5-methyl
  source 1..23: mol_type = other DNA
atcaaggaagatggcatttctag

SEQ ID NO: 10606 - DNA, 22 bp, synthetic construct
  misc_feature 1..22: note = Description of Artificial Sequence: Synthetic Antisense oligonucleotide
  modified_base 1..2: mod_base = OTHER; note = bicyclic nucleic acid (BNA)
  modified_base 21..22: mod_base = OTHER; note = bicyclic nucleic acid (BNA)
  modified_base 3: mod_base = OTHER; note = 5-methyl
  modified_base 15: mod_base = OTHER; note = 5-methyl
  modified_base 20: mod_base = OTHER; note = 5-methyl
  source 1..22: mol_type = other DNA
atcaaggaagatggcatttcta

SEQ ID NO: 10607 - DNA, 21 bp, synthetic construct
  misc_feature 1..21: note = Description of Artificial Sequence: Synthetic Antisense oligonucleotide
  modified_base 1..2: mod_base = OTHER; note = bicyclic nucleic acid (BNA)
  modified_base 20..21: mod_base = OTHER; note = bicyclic nucleic acid (BNA)
  modified_base 3: mod_base = OTHER; note = 5-methyl
  modified_base 15: mod_base = OTHER; note = 5-methyl
  modified_base 20: mod_base = OTHER; note = 5-methyl
  source 1..21: mol_type = other DNA
atcaaggaagatggcatttct

SEQ ID NO: 10608 - DNA, 20 bp, synthetic construct
  misc_feature 1..20: note = Description of Artificial Sequence: Synthetic Antisense oligonucleotide
  modified_base 1..2: mod_base = OTHER; note = bicyclic nucleic acid (BNA)
  modified_base 19..20: mod_base = OTHER; note = bicyclic nucleic acid (BNA)
  modified_base 3: mod_base = OTHER; note = 5-methyl
  modified_base 15: mod_base = OTHER; note = 5-methyl
  modified_base 20: mod_base = OTHER; note = 5-methyl
  source 1..20: mol_type = other DNA
atcaaggaagatggcatttc

SEQ ID NO: 10609 - DNA, 19 bp, synthetic construct
  misc_feature 1..19: note = Description of Artificial Sequence: Synthetic Antisense oligonucleotide
  modified_base 1..2: mod_base = OTHER; note = bicyclic nucleic acid (BNA)
  modified_base 18..19: mod_base = OTHER; note = bicyclic nucleic acid (BNA)
  modified_base 3: mod_base = OTHER; note = 5-methyl
  modified_base 15: mod_base = OTHER; note = 5-methyl
  source 1..19: mol_type = other DNA
atcaaggaagatggcattt

SEQ ID NO: 10610 - DNA, 18 bp, synthetic construct
  misc_feature 1..18: note = Description of Artificial Sequence: Synthetic Antisense oligonucleotide
  modified_base 1..2: mod_base = OTHER; note = bicyclic nucleic acid (BNA)
  modified_base 17..18: mod_base = OTHER; note = bicyclic nucleic acid (BNA)
  modified_base 3: mod_base = OTHER; note = 5-methyl
  modified_base 15: mod_base = OTHER; note = 5-methyl
  source 1..18: mol_type = other DNA
atcaaggaagatggcatt

SEQ ID NO: 10611 - DNA, 17 bp, synthetic construct
  misc_feature 1..17: note = Description of Artificial Sequence: Synthetic Antisense oligonucleotide
  modified_base 1..2: mod_base = OTHER; note = bicyclic nucleic acid (BNA)
  modified_base 16..17: mod_base = OTHER; note = bicyclic nucleic acid (BNA)
  modified_base 3: mod_base = OTHER; note = 5-methyl
  modified_base 15: mod_base = OTHER; note = 5-methyl
  source 1..17: mol_type = other DNA
atcaaggaagatggcat

SEQ ID NO: 10612 - DNA, 16 bp, synthetic construct
  misc_feature 1..16: note = Description of Artificial Sequence: Synthetic Antisense oligonucleotide
  modified_base 1..2: mod_base = OTHER; note = bicyclic nucleic acid (BNA)
  modified_base 15..16: mod_base = OTHER; note = bicyclic nucleic acid (BNA)
  modified_base 3: mod_base = OTHER; note = 5-methyl
  modified_base 15: mod_base = OTHER; note = 5-methyl
  source 1..16: mol_type = other DNA
atcaaggaagatggca

SEQ ID NO: 10613 - DNA, 15 bp, synthetic construct
  misc_feature 1..15: note = Description of Artificial Sequence: Synthetic Antisense oligonucleotide
  modified_base 1..2: mod_base = OTHER; note = bicyclic nucleic acid (BNA)
  modified_base 14..15: mod_base = OTHER; note = bicyclic nucleic acid (BNA)
  modified_base 3: mod_base = OTHER; note = 5-methyl
  modified_base 15: mod_base = OTHER; note = 5-methyl
  source 1..15: mol_type = other DNA
atcaaggaagatggc

SEQ ID NO: 10614 - DNA, 14 bp, synthetic construct
  misc_feature 1..14: note = Description of Artificial Sequence: Synthetic Antisense oligonucleotide
  modified_base 1..2: mod_base = OTHER; note = bicyclic nucleic acid (BNA)
  modified_base 13..14: mod_base = OTHER; note = bicyclic nucleic acid (BNA)
  modified_base 3: mod_base = OTHER; note = 5-methyl
  source 1..14: mol_type = other DNA
atcaaggaagatgg

SEQ ID NO: 10615 - DNA, 13 bp, synthetic construct
  misc_feature 1..13: note = Description of Artificial Sequence: Synthetic Antisense oligonucleotide
  modified_base 1..2: mod_base = OTHER; note = bicyclic nucleic acid (BNA)
  modified_base 12..13: mod_base = OTHER; note = bicyclic nucleic acid (BNA)
  modified_base 3: mod_base = OTHER; note = 5-methyl
  source 1..13: mol_type = other DNA
atcaaggaagatg

SEQ ID NO: 10616 - DNA, 12 bp, synthetic construct
  misc_feature 1..12: note = Description of Artificial Sequence: Synthetic Antisense oligonucleotide
  modified_base 1..2: mod_base = OTHER; note = bicyclic nucleic acid (BNA)
  modified_base 11..12: mod_base = OTHER; note = bicyclic nucleic acid (BNA)
  modified_base 3: mod_base = OTHER; note = 5-methyl
  source 1..12: mol_type = other DNA
atcaaggaagat

SEQ ID NO: 10617 - DNA, 11 bp, synthetic construct
  misc_feature 1..11: note = Description of Artificial Sequence: Synthetic Antisense oligonucleotide
  modified_base 1..2: mod_base = OTHER; note = bicyclic nucleic acid (BNA)
  modified_base 10..11: mod_base = OTHER; note = bicyclic nucleic acid (BNA)
  modified_base 3: mod_base = OTHER; note = 5-methyl
  source 1..11: mol_type = other DNA
atcaaggaaga

SEQ ID NO: 10618 - DNA, 10 bp, synthetic construct
  misc_feature 1..10: note = Description of Artificial Sequence: Synthetic Antisense oligonucleotide
  modified_base 1..2: mod_base = OTHER; note = bicyclic nucleic acid (BNA)
  modified_base 9..10: mod_base = OTHER; note = bicyclic nucleic acid (BNA)
  modified_base 3: mod_base = OTHER; note = 5-methyl
  source 1..10: mol_type = other DNA
atcaaggaag

SEQ ID NO: 10619 - RNA, 18 nt, synthetic construct
  misc_feature 1..18: note = Description of Artificial Sequence: Synthetic Antisense oligonucleotide
  modified_base 2: mod_base = OTHER; note = bicyclic nucleic acid (BNA)
  source 1..18: mol_type = other RNA
ggtaagttctgtccaagc

SEQ ID NO: 10620 - RNA, 18 nt, synthetic construct
  misc_feature 1..18: note = Description of Artificial Sequence: Synthetic Antisense oligonucleotide
  modified_base 9: mod_base = OTHER; note = bicyclic nucleic acid (BNA)
  source 1..18: mol_type = other RNA
ggtaagttctgtccaagc

SEQ ID NO: 10621 - RNA, 18 nt, synthetic construct
  misc_feature 1..18: note = Description of Artificial Sequence: Synthetic Antisense oligonucleotide
  modified_base 11: mod_base = OTHER; note = bicyclic nucleic acid (BNA)
  source 1..18: mol_type = other RNA
ggtaagttctgtccaagc

SEQ ID NO: 10622 - RNA, 18 nt, synthetic construct
  misc_feature 1..18: note = Description of Artificial Sequence: Synthetic Antisense oligonucleotide
  modified_base 6: mod_base = OTHER; note = bicyclic nucleic acid (BNA)
  source 1..18: mol_type = other RNA
ggtaagttctgtccaagc

SEQ ID NO: 10623 - RNA, 18 nt, synthetic construct
  misc_feature 1..18: note = Description of Artificial Sequence: Synthetic Antisense oligonucleotide
  modified_base 17: mod_base = OTHER; note = bicyclic nucleic acid (BNA)
  source 1..18: mol_type = other RNA
ggtaagttctgtccaagc

SEQ ID NO: 10624 - RNA, 18 nt, synthetic construct
  misc_feature 1..18: note = Description of Artificial Sequence: Synthetic Antisense oligonucleotide
  modified_base 13: mod_base = OTHER; note = bicyclic nucleic acid (BNA)
  source 1..18: mol_type = other RNA
ggtaagttctgtccaagc

SEQ ID NO: 10625 - RNA, 18 nt, synthetic construct
  misc_feature 1..18: note = Description of Artificial Sequence: Synthetic Antisense oligonucleotide
  modified_base 14: mod_base = OTHER; note = bicyclic nucleic acid (BNA)
  source 1..18: mol_type = other RNA
ggtaagttctgtccaagc

SEQ ID NO: 10626 - RNA, 18 nt, synthetic construct
  misc_feature 1..18: note = Description of Artificial Sequence: Synthetic Antisense oligonucleotide
  modified_base 16: mod_base = OTHER; note = bicyclic nucleic acid (BNA)
  source 1..18: mol_type = other RNA
gtaagttctgtccaagcc

SEQ ID NO: 10627 - RNA, 18 nt, synthetic construct
  misc_feature 1..18: note = Description of Artificial Sequence: Synthetic Antisense oligonucleotide
  modified_base 10: mod_base = OTHER; note = bicyclic nucleic acid (BNA)
  source 1..18: mol_type = other RNA
gtaagttctgtccaagcc

SEQ ID NO: 10628 - RNA, 18 nt, synthetic construct
  misc_feature 1..18: note = Description of Artificial Sequence: Synthetic Antisense oligonucleotide
  modified_base 5: mod_base = OTHER; note = bicyclic nucleic acid (BNA)
  source 1..18: mol_type = other RNA
gtaagttctgtccaagcc

SEQ ID NO: 10629 - RNA, 18 nt, synthetic construct
  misc_feature 1..18: note = Description of Artificial Sequence: Synthetic Antisense oligonucleotide
  modified_base 17: mod_base = OTHER; note = bicyclic nucleic acid (BNA)
  source 1..18: mol_type = other RNA
gtaagttctgtccaagcc

SEQ ID NO: 10630 - RNA, 18 nt, synthetic construct
  misc_feature 1..18: note = Description of Artificial Sequence: Synthetic Antisense oligonucleotide
  modified_base 12: mod_base = OTHER; note = bicyclic nucleic acid (BNA)
  source 1..18: mol_type = other RNA
gtaagttctgtccaagcc

SEQ ID NO: 10631 - RNA, 18 nt, synthetic construct
  misc_feature 1..18: note = Description of Artificial Sequence: Synthetic Antisense oligonucleotide
  modified_base 13: mod_base = OTHER; note = bicyclic nucleic acid (BNA)
  source 1..18: mol_type = other RNA
gtaagttctgtccaagcc

SEQ ID NO: 10632 - RNA, 18 nt, synthetic construct
  misc_feature 1..18: note = Description of Artificial Sequence: Synthetic Antisense oligonucleotide
  modified_base 8: mod_base = OTHER; note = bicyclic nucleic acid (BNA)
  source 1..18: mol_type = other RNA
gtaagttctgtccaagcc

SEQ ID NO: 10633 - RNA, 18 nt, synthetic construct
  misc_feature 1..18: note = Description of Artificial Sequence: Synthetic Antisense oligonucleotide
  modified_base 2: mod_base = OTHER; note = bicyclic nucleic acid (BNA)
  source 1..18: mol_type = other RNA
agtcggtaagttctgtcc

SEQ ID NO: 10634 - RNA, 18 nt, synthetic construct
  misc_feature 1..18: note = Description of Artificial Sequence: Synthetic Antisense oligonucleotide
  modified_base 4: mod_base = OTHER; note = bicyclic nucleic acid (BNA)
  source 1..18: mol_type = other RNA
agtcggtaagttctgtcc

SEQ ID NO: 10635 - RNA, 18 nt, synthetic construct
  misc_feature 1..18: note = Description of Artificial Sequence: Synthetic Antisense oligonucleotide
  modified_base 10: mod_base = OTHER; note = bicyclic nucleic acid (BNA)
  source 1..18: mol_type = other RNA
agtcggtaagttctgtcc

SEQ ID NO: 10636 - RNA, 18 nt, synthetic construct
  misc_feature 1..18: note = Description of Artificial Sequence: Synthetic Antisense oligonucleotide
  modified_base 5: mod_base = OTHER; note = bicyclic nucleic acid (BNA)
  source 1..18: mol_type = other RNA
agtcggtaagttctgtcc

SEQ ID NO: 10637 - RNA, 18 nt, synthetic construct
  misc_feature 1..18: note = Description of Artificial Sequence: Synthetic Antisense oligonucleotide
  modified_base 6: mod_base = OTHER; note = bicyclic nucleic acid (BNA)
  source 1..18: mol_type = other RNA
agtcggtaagttctgtcc

SEQ ID NO: 10638 - RNA, 18 nt, synthetic construct
  misc_feature 1..18: note = Description of Artificial Sequence: Synthetic Antisense oligonucleotide
  modified_base 17: mod_base = OTHER; note = bicyclic nucleic acid (BNA)
  source 1..18: mol_type = other RNA
agtcggtaagttctgtcc

SEQ ID NO: 10639 - RNA, 18 nt, synthetic construct
  misc_feature 1..18: note = Description of Artificial Sequence: Synthetic Antisense oligonucleotide
  modified_base 13: mod_base = OTHER; note = bicyclic nucleic acid (BNA)
  source 1..18: mol_type = other RNA
agtcggtaagttctgtcc

SEQ ID NO: 10640 - RNA, 18 nt, synthetic construct
  misc_feature 1..18: note = Description of Artificial Sequence: Synthetic Antisense oligonucleotide
  modified_base 15: mod_base = OTHER; note = bicyclic nucleic acid (BNA)
  source 1..18: mol_type = other RNA
agtcggtaagttctgtcc

SEQ ID NO: 10641 - RNA, 18 nt, synthetic construct
  misc_feature 1..18: note = Description of Artificial Sequence: Synthetic Antisense oligonucleotide
  modified_base 3: mod_base = OTHER; note = bicyclic nucleic acid (BNA)
  source 1..18: mol_type = other RNA
ctgtccaagcccggttga

SEQ ID NO: 10642 - RNA, 18 nt, synthetic construct
  misc_feature 1..18: note = Description of Artificial Sequence: Synthetic Antisense oligonucleotide
  modified_base 9: mod_base = OTHER; note = bicyclic nucleic acid (BNA)
  source 1..18: mol_type = other RNA
ctgtccaagcccggttga

SEQ ID NO: 10643 - RNA, 18 nt, synthetic construct
  misc_feature 1..18: note = Description of Artificial Sequence: Synthetic Antisense oligonucleotide
  modified_base 10: mod_base = OTHER; note = bicyclic nucleic acid (BNA)
  source 1..18: mol_type = other RNA
ctgtccaagcccggttga

SEQ ID NO: 10644 - RNA, 18 nt, synthetic construct
  misc_feature 1..18: note = Description of Artificial Sequence: Synthetic Antisense oligonucleotide
  modified_base 5: mod_base = OTHER; note = bicyclic nucleic acid (BNA)
  source 1..18: mol_type = other RNA
ctgtccaagcccggttga

SEQ ID NO: 10645 - RNA, 18 nt, synthetic construct
  misc_feature 1..18: note = Description of Artificial Sequence: Synthetic Antisense oligonucleotide
  modified_base 11: mod_base = OTHER; note = bicyclic nucleic acid (BNA)
  source 1..18: mol_type = other RNA
ctgtccaagcccggttga

SEQ ID NO: 10646 - RNA, 18 nt, synthetic construct
  misc_feature 1..18: note = Description of Artificial Sequence: Synthetic Antisense oligonucleotide
  modified_base 6: mod_base = OTHER; note = bicyclic nucleic acid (BNA)
  source 1..18: mol_type = other RNA
ctgtccaagcccggttga

SEQ ID NO: 10647 - RNA, 18 nt, synthetic construct
  misc_feature 1..18: note = Description of Artificial Sequence: Synthetic Antisense oligonucleotide
  modified_base 17: mod_base = OTHER; note = bicyclic nucleic acid (BNA)
  source 1..18: mol_type = other RNA
ctgtccaagcccggttga

SEQ ID NO: 10648 - RNA, 18 nt, synthetic construct
  misc_feature 1..18: note = Description of Artificial Sequence: Synthetic Antisense oligonucleotide
  modified_base 12: mod_base = OTHER; note = bicyclic nucleic acid (BNA)
  source 1..18: mol_type = other RNA
ctgtccaagcccggttga

SEQ ID NO: 10649 - RNA, 18 nt, synthetic construct
  misc_feature 1..18: note = Description of Artificial Sequence: Synthetic Antisense oligonucleotide
  modified_base 13: mod_base = OTHER; note = bicyclic nucleic acid (BNA)
  source 1..18: mol_type = other RNA
ctgtccaagcccggttga

SEQ ID NO: 10650 - RNA, 18 nt, synthetic construct
  misc_feature 1..18: note = Description of Artificial Sequence: Synthetic Antisense oligonucleotide
  modified_base 14: mod_base = OTHER; note = bicyclic nucleic acid (BNA)
  source 1..18: mol_type = other RNA
ctgtccaagcccggttga

SEQ ID NO: 10651 - RNA, 18 nt, synthetic construct
  misc_feature 1..18: note = Description of Artificial Sequence: Synthetic Antisense oligonucleotide
  modified_base 9: mod_base = OTHER; note = bicyclic nucleic acid (BNA)
  modified_base 14: mod_base = OTHER; note = bicyclic nucleic acid (BNA)
  source 1..18: mol_type = other RNA
ggtaagttctgtccaagc

SEQ ID NO: 10652 - RNA, 18 nt, synthetic construct
  misc_feature 1..18: note = Description of Artificial Sequence: Synthetic Antisense oligonucleotide
  modified_base 6: mod_base = OTHER; note = bicyclic nucleic acid (BNA)
  modified_base 14: mod_base = OTHER; note = bicyclic nucleic acid (BNA)
  source 1..18: mol_type = other RNA
ggtaagttctgtccaagc

SEQ ID NO: 10653 - RNA, 18 nt, synthetic construct
  misc_feature 1..18: note = Description of Artificial Sequence: Synthetic Antisense oligonucleotide
  modified_base 13: mod_base = OTHER; note = bicyclic nucleic acid (BNA)
  modified_base 17: mod_base = OTHER; note = bicyclic nucleic acid (BNA)
  source 1..18: mol_type = other RNA
ggtaagttctgtccaagc

SEQ ID NO: 10654 - RNA, 18 nt, synthetic construct
  misc_feature 1..18: note = Description of Artificial Sequence: Synthetic Antisense oligonucleotide
  modified_base 6: mod_base = OTHER; note = bicyclic nucleic acid (BNA)
  modified_base 9: mod_base = OTHER; note = bicyclic nucleic acid (BNA)
  source 1..18: mol_type = other RNA
ggtaagttctgtccaagc

SEQ ID NO: 10655 - RNA, 18 nt, synthetic construct
  misc_feature 1..18: note = Description of Artificial Sequence: Synthetic Antisense oligonucleotide
  modified_base 13..14: mod_base = OTHER; note = bicyclic nucleic acid (BNA)
  source 1..18: mol_type = other RNA
ggtaagttctgtccaagc

SEQ ID NO: 10656 - RNA, 18 nt, synthetic construct
  misc_feature 1..18: note = Description of Artificial Sequence: Synthetic Antisense oligonucleotide
  modified_base 2: mod_base = OTHER; note = bicyclic nucleic acid (BNA)
  modified_base 17: mod_base = OTHER; note = bicyclic nucleic acid (BNA)
  source 1..18: mol_type = other RNA
ggtaagttctgtccaagc

SEQ ID NO: 10657 - RNA, 18 nt, synthetic construct
  misc_feature 1..18: note = Description of Artificial Sequence: Synthetic Antisense oligonucleotide
  modified_base 6: mod_base = OTHER; note = bicyclic nucleic acid (BNA)
  modified_base 13: mod_base = OTHER; note = bicyclic nucleic acid (BNA)
  source 1..18: mol_type = other RNA
ggtaagttctgtccaagc

SEQ ID NO: 10658 - RNA, 18 nt, synthetic construct
  misc_feature 1..18: note = Description of Artificial Sequence: Synthetic Antisense oligonucleotide
  modified_base 9: mod_base = OTHER; note = bicyclic nucleic acid (BNA)
  modified_base 11: mod_base = OTHER; note = bicyclic nucleic acid (BNA)
  source 1..18: mol_type = other RNA
ggtaagttctgtccaagc

SEQ ID NO: 10659 - RNA, 18 nt, synthetic construct
  misc_feature 1..18: note = Description of Artificial Sequence: Synthetic Antisense oligonucleotide
  modified_base 14: mod_base = OTHER; note = bicyclic nucleic acid (BNA)
  modified_base 17: mod_base = OTHER; note = bicyclic nucleic acid (BNA)
  source 1..18: mol_type = other RNA
ggtaagttctgtccaagc

SEQ ID NO: 10660 - RNA, 18 nt, synthetic construct
  misc_feature 1..18: note = Description of Artificial Sequence: Synthetic Antisense oligonucleotide
  modified_base 11: mod_base = OTHER; note = bicyclic nucleic acid (BNA)
  modified_base 13: mod_base = OTHER; note = bicyclic nucleic acid (BNA)
  source 1..18: mol_type = other RNA
ggtaagttctgtccaagc

SEQ ID NO: 10661 - RNA, 18 nt, synthetic construct
  misc_feature 1..18: note = Description of Artificial Sequence: Synthetic Antisense oligonucleotide
  modified_base 2: mod_base = OTHER; note = bicyclic nucleic acid (BNA)
  modified_base 6: mod_base = OTHER; note = bicyclic nucleic acid (BNA)
  source 1..18: mol_type = other RNA
ggtaagttctgtccaagc

SEQ ID NO: 10662 - RNA, 18 nt, synthetic construct
  misc_feature 1..18: note = Description of Artificial Sequence: Synthetic Antisense oligonucleotide
  modified_base 2: mod_base = OTHER; note = bicyclic nucleic acid (BNA)
  modified_base 11: mod_base = OTHER; note = bicyclic nucleic acid (BNA)
  source 1..18: mol_type = other RNA
ggtaagttctgtccaagc

SEQ ID NO: 10663 - RNA, 18 nt, synthetic construct
  misc_feature 1..18: note = Description of Artificial Sequence: Synthetic Antisense oligonucleotide
  modified_base 9: mod_base = OTHER; note = bicyclic nucleic acid (BNA)
  modified_base 17: mod_base = OTHER; note = bicyclic nucleic acid (BNA)
  source 1..18: mol_type = other RNA
ggtaagttctgtccaagc

SEQ ID NO: 10664 - RNA, 18 nt, synthetic construct
  misc_feature 1..18: note = Description of Artificial Sequence: Synthetic Antisense oligonucleotide
  modified_base 2: mod_base = OTHER; note = bicyclic nucleic acid (BNA)
  modified_base 14: mod_base = OTHER; note = bicyclic nucleic acid (BNA)
  source 1..18: mol_type = other RNA
ggtaagttctgtccaagc

SEQ ID NO: 10665 - RNA, 18 nt, synthetic construct
  misc_feature 1..18: note = Description of Artificial Sequence: Synthetic Antisense oligonucleotide
  modified_base 11: mod_base = OTHER; note = bicyclic nucleic acid (BNA)
  modified_base 14: mod_base = OTHER; note = bicyclic nucleic acid (BNA)
  source 1..18: mol_type = other RNA
ggtaagttctgtccaagc

SEQ ID NO: 10666 - RNA, 18 nt, synthetic construct
  misc_feature 1..18: note = Description of Artificial Sequence: Synthetic Antisense oligonucleotide
  modified_base 6: mod_base = OTHER; note = bicyclic nucleic acid (BNA)
  modified_base 11: mod_base = OTHER; note = bicyclic nucleic acid (BNA)
  source 1..18: mol_type = other RNA
ggtaagttctgtccaagc

SEQ ID NO: 10667 - RNA, 18 nt, synthetic construct
  misc_feature 1..18: note = Description of Artificial Sequence: Synthetic Antisense oligonucleotide
  modified_base 2: mod_base = OTHER; note = bicyclic nucleic acid (BNA)
  modified_base 13: mod_base = OTHER; note = bicyclic nucleic acid (BNA)
  source 1..18: mol_type = other RNA
ggtaagttctgtccaagc

SEQ ID NO: 10668 - RNA, 18 nt, synthetic construct
  misc_feature 1..18: note = Description of Artificial Sequence: Synthetic Antisense oligonucleotide
  modified_base 9: mod_base = OTHER; note = bicyclic nucleic acid (BNA)
  modified_base 13: mod_base = OTHER; note = bicyclic nucleic acid (BNA)
  source 1..18: mol_type = other RNA
ggtaagttctgtccaagc

SEQ ID NO: 10669 - RNA, 18 nt, synthetic construct
  misc_feature 1..18: note = Description of Artificial Sequence: Synthetic Antisense oligonucleotide
  modified_base 6: mod_base = OTHER; note = bicyclic nucleic acid (BNA)
  modified_base 17: mod_base = OTHER; note = bicyclic nucleic acid (BNA)
  source 1..18: mol_type = other RNA
ggtaagttctgtccaagc

SEQ ID NO: 10670 - RNA, 18 nt, synthetic construct
  misc_feature 1..18: note = Description of Artificial Sequence: Synthetic Antisense oligonucleotide
  modified_base 11: mod_base = OTHER; note = bicyclic nucleic acid (BNA)
  modified_base 17: mod_base = OTHER; note = bicyclic nucleic acid (BNA)
  source 1..18: mol_type = other RNA
ggtaagttctgtccaagc

SEQ ID NO: 10671 - RNA, 18 nt, synthetic construct
  misc_feature 1..18: note = Description of Artificial Sequence: Synthetic Antisense oligonucleotide
  modified_base 2: mod_base = OTHER; note = bicyclic nucleic acid (BNA)
  modified_base 9: mod_base = OTHER; note = bicyclic nucleic acid (BNA)
  source 1..18: mol_type = other RNA
ggtaagttctgtccaagc

SEQ ID NO: 10672 - RNA, 18 nt, synthetic construct
  misc_feature 1..18: note = Description of Artificial Sequence: Synthetic Antisense oligonucleotide
  modified_base 12: mod_base = OTHER; note = bicyclic nucleic acid (BNA)
  modified_base 17: mod_base = OTHER; note = bicyclic nucleic acid (BNA)
  source 1..18: mol_type = other RNA
gtaagttctgtccaagcc

SEQ ID NO: 10673 - RNA, 18 nt, synthetic construct
  misc_feature 1..18: note = Description of Artificial Sequence: Synthetic Antisense oligonucleotide
  modified_base 5: mod_base = OTHER; note = bicyclic nucleic acid (BNA)
  modified_base 8: mod_base = OTHER; note = bicyclic nucleic acid (BNA)
  source 1..18: mol_type = other RNA
gtaagttctgtccaagcc

SEQ ID NO: 10674 - RNA, 18 nt, synthetic construct
  misc_feature 1..18: note = Description of Artificial Sequence: Synthetic Antisense oligonucleotide
  modified_base 8: mod_base = OTHER; note = bicyclic nucleic acid (BNA)
  modified_base 13: mod_base = OTHER; note = bicyclic nucleic acid (BNA)
  source 1..18: mol_type = other RNA
gtaagttctgtccaagcc

SEQ ID NO: 10675 - RNA, 18 nt, synthetic construct
  misc_feature 1..18: note = Description of Artificial Sequence: Synthetic Antisense oligonucleotide
  modified_base 5: mod_base = OTHER; note = bicyclic nucleic acid (BNA)
  modified_base 13: mod_base = OTHER; note = bicyclic nucleic acid (BNA)
  source 1..18: mol_type = other RNA
gtaagttctgtccaagcc

SEQ ID NO: 10676 - RNA, 18 nt, synthetic construct
  misc_feature 1..18: note = Description of Artificial Sequence: Synthetic Antisense oligonucleotide
  modified_base 8: mod_base = OTHER; note = bicyclic nucleic acid (BNA)
  modified_base 17: mod_base = OTHER; note = bicyclic nucleic acid (BNA)
  source 1..18: mol_type = other RNA
gtaagttctgtccaagcc

SEQ ID NO: 10677 - RNA, 18 nt, synthetic construct
  misc_feature 1..18: note = Description of Artificial Sequence: Synthetic Antisense oligonucleotide
  modified_base 13: mod_base = OTHER; note = bicyclic nucleic acid (BNA)
  modified_base 17: mod_base = OTHER; note = bicyclic nucleic acid (BNA)
  source 1..18: mol_type = other RNA
gtaagttctgtccaagcc

SEQ ID NO: 10678 - RNA, 18 nt, synthetic construct
  misc_feature 1..18: note = Description of Artificial Sequence: Synthetic Antisense oligonucleotide
  modified_base 8: mod_base = OTHER; note = bicyclic nucleic acid (BNA)
  modified_base 12: mod_base = OTHER; note = bicyclic nucleic acid (BNA)
  source 1..18: mol_type = other RNA
gtaagttctgtccaagcc

SEQ ID NO: 10679 - RNA, 18 nt, synthetic construct
  misc_feature 1..18: note = Description of Artificial Sequence: Synthetic Antisense oligonucleotide
  modified_base 5: mod_base = OTHER; note = bicyclic nucleic acid (BNA)
  modified_base 10: mod_base = OTHER; note = bicyclic nucleic acid (BNA)
  source 1..18: mol_type = other RNA
gtaagttctgtccaagcc

SEQ ID NO: 10680 - RNA, 18 nt, synthetic construct
  misc_feature 1..18: note = Description of Artificial Sequence: Synthetic Antisense oligonucleotide
  modified_base 8: mod_base = OTHER; note = bicyclic nucleic acid (BNA)
  modified_base 16: mod_base = OTHER; note = bicyclic nucleic acid (BNA)
  source 1..18: mol_type = other RNA
gtaagttctgtccaagcc

SEQ ID NO: 10681 - RNA, 18 nt, synthetic construct
  misc_feature 1..18: note = Description of Artificial Sequence: Synthetic Antisense oligonucleotide
  modified_base 10: mod_base = OTHER; note = bicyclic nucleic acid (BNA)
  modified_base 16: mod_base = OTHER; note = bicyclic nucleic acid (BNA)
  source 1..18: mol_type = other RNA
gtaagttctgtccaagcc

SEQ ID NO: 10682 - RNA, 18 nt, synthetic construct
  misc_feature 1..18: note = Description of Artificial Sequence: Synthetic Antisense oligonucleotide
  modified_base 10: mod_base = OTHER; note = bicyclic nucleic acid (BNA)
  modified_base 12: mod_base = OTHER; note = bicyclic nucleic acid (BNA)
  source 1..18: mol_type = other RNA
gtaagttctgtccaagcc

SEQ ID NO: 10683 - RNA, 18 nt, synthetic construct
  misc_feature 1..18: note = Description of Artificial Sequence: Synthetic Antisense oligonucleotide
  modified_base 5: mod_base = OTHER; note = bicyclic nucleic acid (BNA)
  modified_base 17: mod_base = OTHER; note = bicyclic nucleic acid (BNA)
  source 1..18: mol_type = other RNA
gtaagttctgtccaagcc

SEQ ID NO: 10684 - RNA, 18 nt, synthetic construct
  misc_feature 1..18: note = Description of Artificial Sequence: Synthetic Antisense oligonucleotide
  modified_base 10: mod_base = OTHER; note = bicyclic nucleic acid (BNA)
  modified_base 17: mod_base = OTHER; note = bicyclic nucleic acid (BNA)
  source 1..18: mol_type = other RNA
gtaagttctgtccaagcc

SEQ ID NO: 10685 - RNA, 18 nt, synthetic construct
  misc_feature 1..18: note = Description of Artificial Sequence: Synthetic Antisense oligonucleotide
  modified_base 12..13: mod_base = OTHER; note = bicyclic nucleic acid (BNA)
  source 1..18: mol_type = other RNA
gtaagttctgtccaagcc

SEQ ID NO: 10686 - RNA, 18 nt, synthetic construct
  misc_feature 1..18: note = Description of Artificial Sequence: Synthetic Antisense oligonucleotide
  modified_base 5: mod_base = OTHER; note = bicyclic nucleic acid (BNA)
  modified_base 12: mod_base = OTHER; note = bicyclic nucleic acid (BNA)
  source 1..18: mol_type = other RNA
gtaagttctgtccaagcc

SEQ ID NO: 10687 - RNA, 18 nt, synthetic construct
  misc_feature 1..18: note = Description of Artificial Sequence: Synthetic Antisense oligonucleotide
  modified_base 8: mod_base = OTHER; note = bicyclic nucleic acid (BNA)
  modified_base 10: mod_base = OTHER; note = bicyclic nucleic acid (BNA)
  source 1..18: mol_type = other RNA
gtaagttctgtccaagcc

SEQ ID NO: 10688 - RNA, 18 nt, synthetic construct
  misc_feature 1..18: note = Description of Artificial Sequence: Synthetic Antisense oligonucleotide
  modified_base 13: mod_base = OTHER; note = bicyclic nucleic acid (BNA)
  modified_base 16: mod_base = OTHER; note = bicyclic nucleic acid (BNA)
  source 1..18: mol_type = other RNA
gtaagttctgtccaagcc

SEQ ID NO: 10689 - RNA, 18 nt, synthetic construct
  misc_feature 1..18: note = Description of Artificial Sequence: Synthetic Antisense oligonucleotide
  modified_base 5: mod_base = OTHER; note = bicyclic nucleic acid (BNA)
  modified_base 16: mod_base = OTHER; note = bicyclic nucleic acid (BNA)
  source 1..18: mol_type = other RNA
gtaagttctgtccaagcc

SEQ ID NO: 10690 - RNA, 18 nt, synthetic construct
  misc_feature 1..18: note = Description of Artificial Sequence: Synthetic Antisense oligonucleotide
  modified_base 12: mod_base = OTHER; note = bicyclic nucleic acid (BNA)
  modified_base 16: mod_base = OTHER; note = bicyclic nucleic acid (BNA)
  source 1..18: mol_type = other RNA
gtaagttctgtccaagcc

SEQ ID NO: 10691 - RNA, 18 nt, synthetic construct
  misc_feature 1..18: note = Description of Artificial Sequence: Synthetic Antisense oligonucleotide
  modified_base 16..17: mod_base = OTHER; note = bicyclic nucleic acid (BNA)
  source 1..18: mol_type = other RNA
gtaagttctgtccaagcc

SEQ ID NO: 10692 - RNA, 18 nt, synthetic construct
  misc_feature 1..18: note = Description of Artificial Sequence: Synthetic Antisense oligonucleotide
  modified_base 10: mod_base = OTHER; note = bicyclic nucleic acid (BNA)
  modified_base 13: mod_base = OTHER; note = bicyclic nucleic acid (BNA)
  source 1..18: mol_type = other RNA
gtaagttctgtccaagcc

SEQ ID NO: 10693 - RNA, 18 nt, synthetic construct
  misc_feature 1..18: note = Description of Artificial Sequence: Synthetic Antisense oligonucleotide
  modified_base 6: mod_base = OTHER; note = bicyclic nucleic acid (BNA)
  modified_base 10: mod_base = OTHER; note = bicyclic nucleic acid (BNA)
  source 1..18: mol_type = other RNA
agtcggtaagttctgtcc

SEQ ID NO: 10694 - RNA, 18 nt, synthetic construct
  misc_feature 1..18: note = Description of Artificial Sequence: Synthetic Antisense oligonucleotide
  modified_base 2: mod_base = OTHER; note = bicyclic nucleic acid (BNA)
  modified_base 4: mod_base = OTHER; note = bicyclic nucleic acid (BNA)
  source 1..18: mol_type = other RNA
agtcggtaagttctgtcc

SEQ ID NO: 10695 - RNA, 18 nt, synthetic construct
  misc_feature 1..18: note = Description of Artificial Sequence: Synthetic Antisense oligonucleotide
  modified_base 5: mod_base = OTHER; note = bicyclic nucleic acid (BNA)
  modified_base 13: mod_base = OTHER; note = bicyclic nucleic acid (BNA)
  source 1..18: mol_type = other RNA
agtcggtaagttctgtcc

SEQ ID NO: 10696 - RNA, 18 nt, synthetic construct
  misc_feature 1..18: note = Description of Artificial Sequence: Synthetic Antisense oligonucleotide
  modified_base 13: mod_base = OTHER; note = bicyclic nucleic acid (BNA)
  modified_base 17: mod_base = OTHER; note = bicyclic nucleic acid (BNA)
  source 1..18: mol_type = other RNA
agtcggtaagttctgtcc

SEQ ID NO: 10697 - RNA, 18 nt, synthetic construct
  misc_feature 1..18: note = Description of Artificial Sequence: Synthetic Antisense oligonucleotide
  modified_base 4: mod_base = OTHER; note = bicyclic nucleic acid (BNA)
  modified_base 15: mod_base = OTHER; note = bicyclic nucleic acid (BNA)
  source 1..18: mol_type = other RNA
agtcggtaagttctgtcc

SEQ ID NO: 10698 - RNA, 18 nt, synthetic construct
  misc_feature 1..18: note = Description of Artificial Sequence: Synthetic Antisense oligonucleotide
  modified_base 5: mod_base = OTHER; note = bicyclic nucleic acid (BNA)
  modified_base 10: mod_base = OTHER; note = bicyclic nucleic acid (BNA)
  source 1..18: mol_type = other RNA
agtcggtaagttctgtcc

SEQ ID NO: 10699 - RNA, 18 nt, synthetic construct
  misc_feature 1..18: note = Description of Artificial Sequence: Synthetic Antisense oligonucleotide
  modified_base 2: mod_base = OTHER; note = bicyclic nucleic acid (BNA)
  modified_base 17: mod_base = OTHER; note = bicyclic nucleic acid (BNA)
  source 1..18: mol_type = other RNA
agtcggtaagttctgtcc

SEQ ID NO: 10700 - RNA, 18 nt, synthetic construct
  misc_feature 1..18: note = Description of Artificial Sequence: Synthetic Antisense oligonucleotide
  modified_base 6: mod_base = OTHER; note = bicyclic nucleic acid (BNA)
  modified_base 13: mod_base = OTHER; note = bicyclic nucleic acid (BNA)
  source 1..18: mol_type = other RNA
agtcggtaagttctgtcc

SEQ ID NO: 10701 - RNA, 18 nt, synthetic construct
  misc_feature 1..18: note = Description of Artificial Sequence: Synthetic Antisense oligonucleotide
  modified_base 2: mod_base = OTHER; note = bicyclic nucleic acid (BNA)
  modified_base 15: mod_base = OTHER; note = bicyclic nucleic acid (BNA)
  source 1..18: mol_type = other RNA
agtcggtaagttctgtcc

SEQ ID NO: 10702 - RNA, 18 nt, synthetic construct
  misc_feature 1..18: note = Description of Artificial Sequence: Synthetic Antisense oligonucleotide
  modified_base 2: mod_base = OTHER; note = bicyclic nucleic acid (BNA)
  modified_base 6: mod_base = OTHER; note = bicyclic nucleic acid (BNA)
  source 1..18: mol_type = other RNA
agtcggtaagttctgtcc

SEQ ID NO: 10703 - RNA, 18 nt, synthetic construct
  misc_feature 1..18: note = Description of Artificial Sequence: Synthetic Antisense oligonucleotide
  modified_base 4: mod_base = OTHER; note = bicyclic nucleic acid (BNA)
  modified_base 17: mod_base = OTHER; note = bicyclic nucleic acid (BNA)
  source 1..18: mol_type = other RNA
agtcggtaagttctgtcc

SEQ ID NO: 10704 - RNA, 18 nt, synthetic construct
  misc_feature 1..18: note = Description of Artificial Sequence: Synthetic Antisense oligonucleotide
  modified_base 10: mod_base = OTHER; note = bicyclic nucleic acid (BNA)
  modified_base 15: mod_base = OTHER; note = bicyclic nucleic acid (BNA)
  source 1..18: mol_type = other RNA
agtcggtaagttctgtcc

SEQ ID NO: 10705 - RNA, 18 nt, synthetic construct
  misc_feature 1..18: note = Description of Artificial Sequence: Synthetic Antisense oligonucleotide
  modified_base 13: mod_base = OTHER; note = bicyclic nucleic acid (BNA)
  modified_base 15: mod_base = OTHER; note = bicyclic nucleic acid (BNA)
  source 1..18: mol_type = other RNA
agtcggtaagttctgtcc

SEQ ID NO: 10706 - RNA, 18 nt, synthetic construct
  misc_feature 1..18: note = Description of Artificial Sequence: Synthetic Antisense oligonucleotide
  modified_base 5..6: mod_base = OTHER; note = bicyclic nucleic acid (BNA)
  source 1..18: mol_type = other RNA
agtcggtaagttctgtcc

SEQ ID NO: 10707 - RNA, 18 nt, synthetic construct
  misc_feature 1..18: note = Description of Artificial Sequence: Synthetic Antisense oligonucleotide
  modified_base 5: mod_base = OTHER; note = bicyclic nucleic acid (BNA)
  modified_base 15: mod_base = OTHER; note = bicyclic nucleic acid (BNA)
  source 1..18: mol_type = other RNA
agtcggtaagttctgtcc

SEQ ID NO: 10708 - RNA, 18 nt, synthetic construct
  misc_feature 1..18: note = Description of Artificial Sequence: Synthetic Antisense oligonucleotide
  modified_base 2: mod_base = OTHER; note = bicyclic nucleic acid (BNA)
  modified_base 5: mod_base = OTHER; note = bicyclic nucleic acid (BNA)
  source 1..18: mol_type = other RNA
agtcggtaagttctgtcc

SEQ ID NO: 10709 - RNA, 18 nt, synthetic construct
  misc_feature 1..18: note = Description of Artificial Sequence: Synthetic Antisense oligonucleotide
  modified_base 5: mod_base = OTHER; note = bicyclic nucleic acid (BNA)
  modified_base 17: mod_base = OTHER; note = bicyclic nucleic acid (BNA)
  source 1..18: mol_type = other RNA
agtcggtaagttctgtcc

SEQ ID NO: 10710 - RNA, 18 nt, synthetic construct
  misc_feature 1..18: note = Description of Artificial Sequence: Synthetic Antisense oligonucleotide
  modified_base 10: mod_base = OTHER; note = bicyclic nucleic acid (BNA)
  modified_base 17: mod_base = OTHER; note = bicyclic nucleic acid (BNA)
  source 1..18: mol_type = other RNA
agtcggtaagttctgtcc

SEQ ID NO: 10711 - RNA, 18 nt, synthetic construct
  misc_feature 1..18: note = Description of Artificial Sequence: Synthetic Antisense oligonucleotide
  modified_base 4: mod_base = OTHER; note = bicyclic nucleic acid (BNA)
  modified_base 10: mod_base = OTHER; note = bicyclic nucleic acid (BNA)
  source 1..18: mol_type = other RNA
agtcggtaagttctgtcc

SEQ ID NO: 10712 - RNA, 18 nt, synthetic construct
  misc_feature 1..18: note = Description of Artificial Sequence: Synthetic Antisense oligonucleotide
  modified_base 2: mod_base = OTHER; note = bicyclic nucleic acid (BNA)
  modified_base 10: mod_base = OTHER; note = bicyclic nucleic acid (BNA)
  source 1..18: mol_type = other RNA
agtcggtaagttctgtcc

SEQ ID NO: 10713 - RNA, 18 nt, synthetic construct
  misc_feature 1..18: note = Description of Artificial Sequence: Synthetic Antisense oligonucleotide
  modified_base 4: mod_base = OTHER; note = bicyclic nucleic acid (BNA)
  modified_base 6: mod_base = OTHER; note = bicyclic nucleic acid (BNA)
  source 1..18: mol_type = other RNA
agtcggtaagttctgtcc

SEQ ID NO: 10714 - RNA, 18 nt, synthetic construct
  misc_feature 1..18: note = Description of Artificial Sequence: Synthetic Antisense oligonucleotide
  modified_base 4: mod_base = OTHER; note = bicyclic nucleic acid (BNA)
  modified_base 13: mod_base = OTHER; note = bicyclic nucleic acid (BNA)
  source 1..18: mol_type = other RNA
agtcggtaagttctgtcc

SEQ ID NO: 10715 - RNA, 18 nt, synthetic construct
  misc_feature 1..18: note = Description of Artificial Sequence: Synthetic Antisense oligonucleotide
  modified_base 15: mod_base = OTHER; note = bicyclic nucleic acid (BNA)
  modified_base 17: mod_base = OTHER; note = bicyclic nucleic acid (BNA)
  source 1..18: mol_type = other RNA
agtcggtaagttctgtcc

SEQ ID NO: 10716 - RNA, 18 nt, synthetic construct
  misc_feature 1..18: note = Description of Artificial Sequence: Synthetic Antisense oligonucleotide
  modified_base 2: mod_base = OTHER; note = bicyclic nucleic acid (BNA)
  modified_base 13: mod_base = OTHER; note = bicyclic nucleic acid (BNA)
  source 1..18: mol_type = other RNA
agtcggtaagttctgtcc

SEQ ID NO: 10717 - RNA, 18 nt, synthetic construct
  misc_feature 1..18: note = Description of Artificial Sequence: Synthetic Antisense oligonucleotide
  modified_base 6: mod_base = OTHER; note = bicyclic nucleic acid (BNA)
  modified_base 17: mod_base = OTHER; note = bicyclic nucleic acid (BNA)
  source 1..18: mol_type = other RNA
agtcggtaagttctgtcc

SEQ ID NO: 10718 - RNA, 18 nt, synthetic construct
  misc_feature 1..18: note = Description of Artificial Sequence: Synthetic Antisense oligonucleotide
  modified_base 6: mod_base = OTHER; note = bicyclic nucleic acid (BNA)
  modified_base 15: mod_base = OTHER; note = bicyclic nucleic acid (BNA)
  source 1..18: mol_type = other RNA
agtcggtaagttctgtcc

SEQ ID NO: 10719 - RNA, 18 nt, synthetic construct
  misc_feature 1..18: note = Description of Artificial Sequence: Synthetic Antisense oligonucleotide
  modified_base 4..5: mod_base = OTHER; note = bicyclic nucleic acid (BNA)
  source 1..18: mol_type = other RNA
agtcggtaagttctgtcc

SEQ ID NO: 10720 - RNA, 18 nt, synthetic construct
  misc_feature 1..18: note = Description of Artificial Sequence: Synthetic Antisense oligonucleotide
  modified_base 10: mod_base = OTHER; note = bicyclic nucleic acid (BNA)
  modified_base 13: mod_base = OTHER; note = bicyclic nucleic acid (BNA)
  source 1..18: mol_type = other RNA
agtcggtaagttctgtcc

SEQ ID NO: 10721 - RNA, 18 nt, synthetic construct
  misc_feature 1..18: note = Description of Artificial Sequence: Synthetic Antisense oligonucleotide
  modified_base 12: mod_base = OTHER; note = bicyclic nucleic acid (BNA)
  modified_base 17: mod_base = OTHER; note = bicyclic nucleic acid (BNA)
  source 1..18: mol_type = other RNA
ctgtccaagcccggttga

SEQ ID NO: 10722 - RNA, 18 nt, synthetic construct
  misc_feature 1..18: note = Description of Artificial Sequence: Synthetic Antisense oligonucleotide
  modified_base 6: mod_base = OTHER; note = bicyclic nucleic acid (BNA)
  modified_base 10: mod_base = OTHER; note = bicyclic nucleic acid (BNA)
  source 1..18: mol_type = other RNA
ctgtccaagcccggttga

SEQ ID NO: 10723 - RNA, 18 nt, synthetic construct
  misc_feature 1..18: note = Description of Artificial Sequence: Synthetic Antisense oligonucleotide
  modified_base 9: mod_base = OTHER; note = bicyclic nucleic acid (BNA)
  modified_base 14: mod_base = OTHER; note = bicyclic nucleic acid (BNA)
  source 1..18: mol_type = other RNA
ctgtccaagcccggttga

SEQ ID NO: 10724 - RNA, 18 nt, synthetic construct
  misc_feature 1..18: note = Description of Artificial Sequence: Synthetic Antisense oligonucleotide
  modified_base 11..12: mod_base = OTHER; note = bicyclic nucleic acid (BNA)
  source 1..18: mol_type = other RNA
ctgtccaagcccggttga

SEQ ID NO: 10725 - RNA, 18 nt, synthetic construct
  misc_feature 1..18: note = Description of Artificial Sequence: Synthetic Antisense oligonucleotide
  modified_base 5: mod_base = OTHER; note = bicyclic nucleic acid (BNA)
  modified_base 9: mod_base = OTHER; note = bicyclic nucleic acid (BNA)
  source 1..18: mol_type = other RNA
ctgtccaagcccggttga

SEQ ID NO: 10726 - RNA, 18 nt, synthetic construct
  misc_feature 1..18: note = Description of Artificial Sequence: Synthetic Antisense oligonucleotide
  modified_base 3: mod_base = OTHER; note = bicyclic nucleic acid (BNA)
  modified_base 9: mod_base = OTHER; note = bicyclic nucleic acid (BNA)
  source 1..18: mol_type = other RNA
ctgtccaagcccggttga

SEQ ID NO: 10727 - RNA, 18 nt, synthetic construct
  misc_feature 1..18: note = Description of Artificial Sequence: Synthetic Antisense oligonucleotide
  modified_base 6: mod_base = OTHER; note = bicyclic nucleic acid (BNA)
  modified_base 14: mod_base = OTHER; note = bicyclic nucleic acid (BNA)
  source 1..18: mol_type = other RNA
ctgtccaagcccggttga

SEQ ID NO: 10728 - RNA, 18 nt, synthetic construct
  misc_feature 1..18: note = Description of Artificial Sequence: Synthetic Antisense oligonucleotide
  modified_base 9..10: mod_base = OTHER; note = bicyclic nucleic acid (BNA)
  source 1..18: mol_type = other RNA
ctgtccaagcccggttga

SEQ ID NO: 10729 - RNA, 18 nt, synthetic construct
  misc_feature 1..18: note = Description of Artificial Sequence: Synthetic Antisense oligonucleotide
  modified_base 5: mod_base = OTHER; note = bicyclic nucleic acid (BNA)
  modified_base 13: mod_base = OTHER; note = bicyclic nucleic acid (BNA)
  source 1..18: mol_type = other RNA
ctgtccaagcccggttga

SEQ ID NO: 10730 - RNA, 18 nt, synthetic construct
  misc_feature 1..18: note = Description of Artificial Sequence: Synthetic Antisense oligonucleotide
  modified_base 3: mod_base = OTHER; note = bicyclic nucleic acid (BNA)
  modified_base 13: mod_base = OTHER; note = bicyclic nucleic acid (BNA)
  source 1..18: mol_type = other RNA
ctgtccaagcccggttga

SEQ ID NO: 10731 - RNA, 18 nt, synthetic construct
  misc_feature 1..18: note = Description of Artificial Sequence: Synthetic Antisense oligonucleotide
  modified_base 13: mod_base = OTHER; note = bicyclic nucleic acid (BNA)
  modified_base 17: mod_base = OTHER; note = bicyclic nucleic acid (BNA)
  source 1..18: mol_type = other RNA
ctgtccaagcccggttga

SEQ ID NO: 10732 - RNA, 18 nt, synthetic construct
  misc_feature 1..18: note = Description of Artificial Sequence: Synthetic Antisense oligonucleotide
  modified_base 3: mod_base = OTHER; note = bicyclic nucleic acid (BNA)
  modified_base 6: mod_base = OTHER; note = bicyclic nucleic acid (BNA)
  source 1..18: mol_type = other RNA
ctgtccaagcccggttga

SEQ ID NO: 10733 - RNA, 18 nt, synthetic construct
  misc_feature 1..18: note = Description of Artificial Sequence: Synthetic Antisense oligonucleotide
  modified_base 6: mod_base = OTHER; note = bicyclic nucleic acid (BNA)
  modified_base 9: mod_base = OTHER; note = bicyclic nucleic acid (BNA)
  source 1..18: mol_type = other RNA
ctgtccaagcccggttga

SEQ ID NO: 10734 - RNA, 18 nt, synthetic construct
  misc_feature 1..18: note = Description of Artificial Sequence: Synthetic Antisense oligonucleotide
  modified_base 5: mod_base = OTHER; note = bicyclic nucleic acid (BNA)
  modified_base 10: mod_base = OTHER; note = bicyclic nucleic acid (BNA)
  source 1..18: mol_type = other RNA
ctgtccaagcccggttga

SEQ ID NO: 10735 - RNA, 18 nt, synthetic construct
  misc_feature 1..18: note = Description of Artificial Sequence: Synthetic Antisense oligonucleotide
  modified_base 3: mod_base = OTHER; note = bicyclic nucleic acid (BNA)
  modified_base 10: mod_base = OTHER; note = bicyclic nucleic acid (BNA)
  source 1..18: mol_type = other RNA
ctgtccaagcccggttga

SEQ ID NO: 10736 - RNA, 18 nt, synthetic construct
  misc_feature 1..18: note = Description of Artificial Sequence: Synthetic Antisense oligonucleotide
  modified_base 13..14: mod_base = OTHER; note = bicyclic nucleic acid (BNA)
  source 1..18: mol_type = other RNA
ctgtccaagcccggttga

SEQ ID NO: 10737 - RNA, 18 nt, synthetic construct
  misc_feature 1..18: note = Description of Artificial Sequence: Synthetic Antisense oligonucleotide
  modified_base 6: mod_base = OTHER; note = bicyclic nucleic acid (BNA)
  modified_base 13: mod_base = OTHER; note = bicyclic nucleic acid (BNA)
  source 1..18: mol_type = other RNA
ctgtccaagcccggttga

SEQ ID NO: 10738 - RNA, 18 nt, synthetic construct
  misc_feature 1..18: note = Description of Artificial Sequence: Synthetic Antisense oligonucleotide
  modified_base 9: mod_base = OTHER; note = bicyclic nucleic acid (BNA)
  modified_base 11: mod_base = OTHER; note = bicyclic nucleic acid (BNA)
  source 1..18: mol_type = other RNA
ctgtccaagcccggttga

SEQ ID NO: 10739 - RNA, 18 nt, synthetic construct
  misc_feature 1..18: note = Description of Artificial Sequence: Synthetic Antisense oligonucleotide
  modified_base 14: mod_base = OTHER; note = bicyclic nucleic acid (BNA)
  modified_base 17: mod_base = OTHER; note = bicyclic nucleic acid (BNA)
  source 1..18: mol_type = other RNA
ctgtccaagcccggttga

SEQ ID NO: 10740 - RNA, 18 nt, synthetic construct
  misc_feature 1..18: note = Description of Artificial Sequence: Synthetic Antisense oligonucleotide
  modified_base 11: mod_base = OTHER; note = bicyclic nucleic acid (BNA)
  modified_base 13: mod_base = OTHER; note = bicyclic nucleic acid (BNA)
  source 1..18: mol_type = other RNA
ctgtccaagcccggttga

SEQ ID NO: 10741 - RNA, 18 nt, synthetic construct
  misc_feature 1..18: note = Description of Artificial Sequence: Synthetic Antisense oligonucleotide
  modified_base 5: mod_base = OTHER; note = bicyclic nucleic acid (BNA)
  modified_base 14: mod_base = OTHER; note = bicyclic nucleic acid (BNA)
  source 1..18: mol_type = other RNA
ctgtccaagcccggttga

SEQ ID NO: 10742 - RNA, 18 nt, synthetic construct
  misc_feature 1..18: note = Description of Artificial Sequence: Synthetic Antisense oligonucleotide
  modified_base 3: mod_base = OTHER; note = bicyclic nucleic acid (BNA)
  modified_base 14: mod_base = OTHER; note = bicyclic nucleic acid (BNA)
  source 1..18: mol_type = other RNA
ctgtccaagcccggttga

SEQ ID NO: 10743 - RNA, 18 nt, synthetic construct
  misc_feature 1..18: note = Description of Artificial Sequence: Synthetic Antisense oligonucleotide
  modified_base 10: mod_base = OTHER; note = bicyclic nucleic acid (BNA)
  modified_base 12: mod_base = OTHER; note = bicyclic nucleic acid (BNA)
  source 1..18: mol_type = other RNA
ctgtccaagcccggttga

SEQ ID NO: 10744 - RNA, 18 nt, synthetic construct
  misc_feature 1..18: note = Description of Artificial Sequence: Synthetic Antisense oligonucleotide
  modified_base 9: mod_base = OTHER; note = bicyclic nucleic acid (BNA)
  modified_base 17: mod_base = OTHER; note = bicyclic nucleic acid (BNA)
  source 1..18: mol_type = other RNA
ctgtccaagcccggttga

SEQ ID NO: 10745 - RNA, 18 nt, synthetic construct
  misc_feature 1..18: note = Description of Artificial Sequence: Synthetic Antisense oligonucleotide
  modified_base 12: mod_base = OTHER; note = bicyclic nucleic acid (BNA)
  modified_base 14: mod_base = OTHER; note = bicyclic nucleic acid (BNA)
  source 1..18: mol_type = other RNA
ctgtccaagcccggttga

SEQ ID NO: 10746 - RNA, 18 nt, synthetic construct
  misc_feature 1..18: note = Description of Artificial Sequence: Synthetic Antisense oligonucleotide
  modified_base 5: mod_base = OTHER; note = bicyclic nucleic acid (BNA)
  modified_base 11: mod_base = OTHER; note = bicyclic nucleic acid (BNA)
  source 1..18: mol_type = other RNA
ctgtccaagcccggttga

SEQ ID NO: 10747 - RNA, 18 nt, synthetic construct
  misc_feature 1..18: note = Description of Artificial Sequence: Synthetic Antisense oligonucleotide
  modified_base 3: mod_base = OTHER; note = bicyclic nucleic acid (BNA)
  modified_base 17: mod_base = OTHER; note = bicyclic nucleic acid (BNA)
  source 1..18: mol_type = other RNA
ctgtccaagcccggttga

SEQ ID NO: 10748 - RNA, 18 nt, synthetic construct
  misc_feature 1..18: note = Description of Artificial Sequence: Synthetic Antisense oligonucleotide
  modified_base 6: mod_base = OTHER; note = bicyclic nucleic acid (BNA)
  modified_base 12: mod_base = OTHER; note = bicyclic nucleic acid (BNA)
  source 1..18: mol_type = other RNA
ctgtccaagcccggttga

SEQ ID NO: 10749 - RNA, 18 nt, synthetic construct
  misc_feature 1..18: note = Description of Artificial Sequence: Synthetic Antisense oligonucleotide
  modified_base 5..6: mod_base = OTHER; note = bicyclic nucleic acid (BNA)
  source 1..18: mol_type = other RNA
ctgtccaagcccggttga

SEQ ID NO: 10750 - RNA, 18 nt, synthetic construct
  misc_feature 1..18: note = Description of Artificial Sequence: Synthetic Antisense oligonucleotide
  modified_base 11: mod_base = OTHER; note = bicyclic nucleic acid (BNA)
  modified_base 14: mod_base = OTHER; note = bicyclic nucleic acid (BNA)
  source 1..18: mol_type = other RNA
ctgtccaagcccggttga

SEQ ID NO: 10751 - RNA, 18 nt, synthetic construct
  misc_feature 1..18: note = Description of Artificial Sequence: Synthetic Antisense oligonucleotide
  modified_base 9: mod_base = OTHER; note = bicyclic nucleic acid (BNA)
  modified_base 12: mod_base = OTHER; note = bicyclic nucleic acid (BNA)
  source 1..18: mol_type = other RNA
ctgtccaagcccggttga

SEQ ID NO: 10752 - RNA, 18 nt, synthetic construct
  misc_feature 1..18: note = Description of Artificial Sequence: Synthetic Antisense oligonucleotide
  modified_base 5: mod_base = OTHER; note = bicyclic nucleic acid (BNA)
  modified_base 17: mod_base = OTHER; note = bicyclic nucleic acid (BNA)
  source 1..18: mol_type = other RNA
ctgtccaagcccggttga

SEQ ID NO: 10753 - RNA, 18 nt, synthetic construct
  misc_feature 1..18: note = Description of Artificial Sequence: Synthetic Antisense oligonucleotide
  modified_base 3: mod_base = OTHER; note = bicyclic nucleic acid (BNA)
  modified_base 11: mod_base = OTHER; note = bicyclic nucleic acid (BNA)
  source 1..18: mol_type = other RNA
ctgtccaagcccggttga

SEQ ID NO: 10754 - RNA, 18 nt, synthetic construct
  misc_feature 1..18: note = Description of Artificial Sequence: Synthetic Antisense oligonucleotide
  modified_base 10..11: mod_base = OTHER; note = bicyclic nucleic acid (BNA)
  source 1..18: mol_type = other RNA
ctgtccaagcccggttga

SEQ ID NO: 10755 - RNA, 18 nt, synthetic construct
  misc_feature 1..18: note = Description of Artificial Sequence: Synthetic Antisense oligonucleotide
  modified_base 10: mod_base = OTHER; note = bicyclic nucleic acid (BNA)
  modified_base 17: mod_base = OTHER; note = bicyclic nucleic acid (BNA)
  source 1..18: mol_type = other RNA
ctgtccaagcccggttga

SEQ ID NO: 10756 - RNA, 18 nt, synthetic construct
  misc_feature 1..18: note = Description of Artificial Sequence: Synthetic Antisense oligonucleotide
  modified_base 12..13: mod_base = OTHER; note = bicyclic nucleic acid (BNA)
  source 1..18: mol_type = other RNA
ctgtccaagcccggttga

SEQ ID NO: 10757 - RNA, 18 nt, synthetic construct
  misc_feature 1..18: note = Description of Artificial Sequence: Synthetic Antisense oligonucleotide
  modified_base 5: mod_base = OTHER; note = bicyclic nucleic acid (BNA)
  modified_base 12: mod_base = OTHER; note = bicyclic nucleic acid (BNA)
  source 1..18: mol_type = other RNA
ctgtccaagcccggttga

SEQ ID NO: 10758 - RNA, 18 nt, synthetic construct
  misc_feature 1..18: note = Description of Artificial Sequence: Synthetic Antisense oligonucleotide
  modified_base 10: mod_base = OTHER; note = bicyclic nucleic acid (BNA)
  modified_base 14: mod_base = OTHER; note = bicyclic nucleic acid (BNA)
  source 1..18: mol_type = other RNA
ctgtccaagcccggttga

SEQ ID NO: 10759 - RNA, 18 nt, synthetic construct
  misc_feature 1..18: note = Description of Artificial Sequence: Synthetic Antisense oligonucleotide
  modified_base 6: mod_base = OTHER; note = bicyclic nucleic acid (BNA)
  modified_base 11: mod_base = OTHER; note = bicyclic nucleic acid (BNA)
  source 1..18: mol_type = other RNA
ctgtccaagcccggttga

SEQ ID NO: 10760 - RNA, 18 nt, synthetic construct
  misc_feature 1..18: note = Description of Artificial Sequence: Synthetic Antisense oligonucleotide
  modified_base 6: mod_base = OTHER; note = bicyclic nucleic acid (BNA)
  modified_base 17: mod_base = OTHER; note = bicyclic nucleic acid (BNA)
  source 1..18: mol_type = other RNA
ctgtccaagcccggttga

SEQ ID NO: 10761 - RNA, 18 nt, synthetic construct
  misc_feature 1..18: note = Description of Artificial Sequence: Synthetic Antisense oligonucleotide
  modified_base 9: mod_base = OTHER; note = bicyclic nucleic acid (BNA)
  modified_base 13: mod_base = OTHER; note = bicyclic nucleic acid (BNA)
  source 1..18: mol_type = other RNA
ctgtccaagcccggttga

SEQ ID NO: 10762 - RNA, 18 nt, synthetic construct
  misc_feature 1..18: note = Description of Artificial Sequence: Synthetic Antisense oligonucleotide
  modified_base 11: mod_base = OTHER; note = bicyclic nucleic acid (BNA)
  modified_base 17: mod_base = OTHER; note = bicyclic nucleic acid (BNA)
  source 1..18: mol_type = other RNA
ctgtccaagcccggttga

SEQ ID NO: 10763 - RNA, 18 nt, synthetic construct
  misc_feature 1..18: note = Description of Artificial Sequence: Synthetic Antisense oligonucleotide
  modified_base 3: mod_base = OTHER; note = bicyclic nucleic acid (BNA)
  modified_base 12: mod_base = OTHER; note = bicyclic nucleic acid (BNA)
  source 1..18: mol_type = other RNA
ctgtccaagcccggttga

SEQ ID NO: 10764 - RNA, 18 nt, synthetic construct
  misc_feature 1..18: note = Description of Artificial Sequence: Synthetic Antisense oligonucleotide
  modified_base 3: mod_base = OTHER; note = bicyclic nucleic acid (BNA)
  modified_base 5: mod_base = OTHER; note = bicyclic nucleic acid (BNA)
  source 1..18: mol_type = other RNA
ctgtccaagcccggttga

SEQ ID NO: 10765 - RNA, 18 nt, synthetic construct
  misc_feature 1..18: note = Description of Artificial Sequence: Synthetic Antisense oligonucleotide
  modified_base 10: mod_base = OTHER; note = bicyclic nucleic acid (BNA)
  modified_base 13: mod_base = OTHER; note = bicyclic nucleic acid (BNA)
  source 1..18: mol_type = other RNA
ctgtccaagcccggttga

SEQ ID NO: 10766 - RNA, 20 nt, synthetic construct
  misc_feature 1..20: note = Description of Artificial Sequence: Synthetic Antisense oligonucleotide
  modified_base 2: mod_base = OTHER; note = bicyclic nucleic acid (BNA)
  source 1..20: mol_type = other RNA
tcaaggaagatggcatttct

SEQ ID NO: 10767 - RNA, 20 nt, synthetic construct
  misc_feature 1..20: note = Description of Artificial Sequence: Synthetic Antisense oligonucleotide
  modified_base 9: mod_base = OTHER; note = bicyclic nucleic acid (BNA)
  source 1..20: mol_type = other RNA
tcaaggaagatggcatttct

SEQ ID NO: 10768 - RNA, 20 nt, synthetic construct
  misc_feature 1..20: note = Description of Artificial Sequence: Synthetic Antisense oligonucleotide
  modified_base 5: mod_base = OTHER; note = bicyclic nucleic acid (BNA)
  source 1..20: mol_type = other RNA
tcaaggaagatggcatttct

SEQ ID NO: 10769 - RNA, 20 nt, synthetic construct
  misc_feature 1..20: note = Description of Artificial Sequence: Synthetic Antisense oligonucleotide
  modified_base 6: mod_base = OTHER; note = bicyclic nucleic acid (BNA)
  source 1..20: mol_type = other RNA
tcaaggaagatggcatttct

SEQ ID NO: 10770 - RNA, 20 nt, synthetic construct
  misc_feature 1..20: note = Description of Artificial Sequence: Synthetic Antisense oligonucleotide
  modified_base 12: mod_base = OTHER; note = bicyclic nucleic acid (BNA)
  source 1..20: mol_type = other RNA
tcaaggaagatggcatttct

SEQ ID NO: 10771 - RNA, 20 nt, synthetic construct
  misc_feature 1..20: note = Description of Artificial Sequence: Synthetic Antisense oligonucleotide
  modified_base 13: mod_base = OTHER; note = bicyclic nucleic acid (BNA)
  source 1..20: mol_type = other RNA
tcaaggaagatggcatttct

SEQ ID NO: 10772 - RNA, 20 nt, synthetic construct
  misc_feature 1..20: note = Description of Artificial Sequence: Synthetic Antisense oligonucleotide
  modified_base 19: mod_base = OTHER; note = bicyclic nucleic acid (BNA)
  source 1..20: mol_type = other RNA
tcaaggaagatggcatttct

SEQ ID NO: 10773 - RNA, 20 nt, synthetic construct
  misc_feature 1..20: note = Description of Artificial Sequence: Synthetic Antisense oligonucleotide
  modified_base 14: mod_base = OTHER; note = bicyclic nucleic acid (BNA)
  source 1..20: mol_type = other RNA
tcaaggaagatggcatttct

SEQ ID NO: 10774 - RNA, 22 nt, synthetic construct
  misc_feature 1..22: note = Description of Artificial Sequence: Synthetic Antisense oligonucleotide
  modified_base 2: mod_base = OTHER; note = bicyclic nucleic acid (BNA)
  source 1..22: mol_type = other RNA
tcaaggaagatggcatttctag

SEQ ID NO: 10775 - RNA, 22 nt, synthetic construct
  misc_feature 1..22: note = Description of Artificial Sequence: Synthetic Antisense oligonucleotide
  modified_base 9: mod_base = OTHER; note = bicyclic nucleic acid (BNA)
  source 1..22: mol_type = other RNA
tcaaggaagatggcatttctag

SEQ ID NO: 10776 - RNA, 22 nt, synthetic construct
  misc_feature 1..22: note = Description of Artificial Sequence: Synthetic Antisense oligonucleotide
  modified_base 5: mod_base = OTHER; note = bicyclic nucleic acid (BNA)
  source 1..22: mol_type = other RNA
tcaaggaagatggcatttctag

SEQ ID NO: 10777 - RNA, 22 nt, synthetic construct
  misc_feature 1..22: note = Description of Artificial Sequence: Synthetic Antisense oligonucleotide
  modified_base 6: mod_base = OTHER; note = bicyclic nucleic acid (BNA)
  source 1..22: mol_type = other RNA
tcaaggaagatggcatttctag

SEQ ID NO: 10778 - RNA, 22 nt, synthetic construct
  misc_feature 1..22: note = Description of Artificial Sequence: Synthetic Antisense oligonucleotide
  modified_base 12: mod_base = OTHER; note = bicyclic nucleic acid (BNA)
  source 1..22: mol_type = other RNA
tcaaggaagatggcatttctag

SEQ ID NO: 10779 - RNA, 22 nt, synthetic construct
  misc_feature 1..22: note = Description of Artificial Sequence: Synthetic Antisense oligonucleotide
  modified_base 13: mod_base = OTHER; note = bicyclic nucleic acid (BNA)
  source 1..22: mol_type = other RNA
tcaaggaagatggcatttctag

SEQ ID NO: 10780 - RNA, 22 nt, synthetic construct
  misc_feature 1..22: note = Description of Artificial Sequence: Synthetic Antisense oligonucleotide
  modified_base 19: mod_base = OTHER; note = bicyclic nucleic acid (BNA)
  source 1..22: mol_type = other RNA
tcaaggaagatggcatttctag

SEQ ID NO: 10781 - RNA, 22 nt, synthetic construct
  misc_feature 1..22: note = Description of Artificial Sequence: Synthetic Antisense oligonucleotide
  modified_base 14: mod_base = OTHER; note = bicyclic nucleic acid (BNA)
  source 1..22: mol_type = other RNA
tcaaggaagatggcatttctag

SEQ ID NO: 10782 - RNA, 20 nt, synthetic construct
  misc_feature 1..20: note = Description of Artificial Sequence: Synthetic Antisense oligonucleotide
  modified_base 9: mod_base = OTHER; note = bicyclic nucleic acid (BNA)
  modified_base 14: mod_base = OTHER; note = bicyclic nucleic acid (BNA)
  source 1..20: mol_type = other RNA
tcaaggaagatggcatttct

SEQ ID NO: 10783 - RNA, 20 nt, synthetic construct
  misc_feature 1..20: note = Description of Artificial Sequence: Synthetic Antisense oligonucleotide
  modified_base 5: mod_base = OTHER; note = bicyclic nucleic acid (BNA)
  modified_base 9: mod_base = OTHER; note = bicyclic nucleic acid (BNA)
  source 1..20: mol_type = other RNA
tcaaggaagatggcatttct

SEQ ID NO: 10784 - RNA, 20 nt, synthetic construct
  misc_feature 1..20: note = Description of Artificial Sequence: Synthetic Antisense oligonucleotide
  modified_base 5: mod_base = OTHER; note = bicyclic nucleic acid (BNA)
  modified_base 19: mod_base = OTHER; note = bicyclic nucleic acid (BNA)
  source 1..20: mol_type = other RNA
tcaaggaagatggcatttct

SEQ ID NO: 10785 - RNA, 20 nt, synthetic construct
  misc_feature 1..20: note = Description of Artificial Sequence: Synthetic Antisense oligonucleotide
  modified_base 6: mod_base = OTHER; note = bicyclic nucleic acid (BNA)
  modified_base 14: mod_base = OTHER; note = bicyclic nucleic acid (BNA)
  source 1..20: mol_type = other RNA
tcaaggaagatggcatttct

SEQ ID NO: 10786 - RNA, 20 nt, synthetic construct
  misc_feature 1..20: note = Description of Artificial Sequence: Synthetic Antisense oligonucleotide
  modified_base 5: mod_base = OTHER; note = bicyclic nucleic acid (BNA)
  modified_base 13: mod_base = OTHER; note = bicyclic nucleic acid (BNA)
  source 1..20: mol_type = other RNA
tcaaggaagatggcatttct

SEQ ID NO: 10787 - RNA, 20 nt, synthetic construct
  misc_feature 1..20: note = Description of Artificial Sequence: Synthetic Antisense oligonucleotide
  modified_base 2: mod_base = OTHER; note = bicyclic nucleic acid (BNA)
  modified_base 12: mod_base = OTHER; note = bicyclic nucleic acid (BNA)
  source 1..20: mol_type = other RNA
tcaaggaagatggcatttct

SEQ ID NO: 10788 - RNA, 20 nt, synthetic construct
  misc_feature 1..20: note = Description of Artificial Sequence: Synthetic Antisense oligonucleotide
  modified_base 6: mod_base = OTHER; note = bicyclic nucleic acid (BNA)
  modified_base 9: mod_base = OTHER; note = bicyclic nucleic acid (BNA)
  source 1..20: mol_type = other RNA
tcaaggaagatggcatttct

SEQ ID NO: 10789 - RNA, 20 nt, synthetic construct
  misc_feature 1..20: note = Description of Artificial Sequence: Synthetic Antisense oligonucleotide
  modified_base 13..14: mod_base = OTHER; note = bicyclic nucleic acid (BNA)
  source 1..20: mol_type = other RNA
tcaaggaagatggcatttct

SEQ ID NO: 10790 - RNA, 20 nt, synthetic construct
  misc_feature 1..20: note = Description of Artificial Sequence: Synthetic Antisense oligonucleotide
  modified_base 6: mod_base = OTHER; note = bicyclic nucleic acid (BNA)
  modified_base 13: mod_base = OTHER; note = bicyclic nucleic acid (BNA)
  source 1..20: mol_type = other RNA
tcaaggaagatggcatttct

SEQ ID NO: 10791 - RNA, 20 nt, synthetic construct
  misc_feature 1..20: note = Description of Artificial Sequence: Synthetic Antisense oligonucleotide
  modified_base 6: mod_base = OTHER; note = bicyclic nucleic acid (BNA)
  modified_base 19: mod_base = OTHER; note = bicyclic nucleic acid (BNA)
  source 1..20: mol_type = other RNA
tcaaggaagatggcatttct

SEQ ID NO: 10792 - RNA, 20 nt, synthetic construct
  misc_feature 1..20: note = Description of Artificial Sequence: Synthetic Antisense oligonucleotide
  modified_base 5: mod_base = OTHER; note = bicyclic nucleic acid (BNA)
  modified_base 14: mod_base = OTHER; note = bicyclic nucleic acid (BNA)
  source 1..20: mol_type = other RNA
tcaaggaagatggcatttct

SEQ ID NO: 10793 - RNA, 20 nt, synthetic construct
  misc_feature 1..20: note = Description of Artificial Sequence: Synthetic Antisense oligonucleotide
  modified_base 2: mod_base = OTHER; note = bicyclic nucleic acid (BNA)
  modified_base 6: mod_base = OTHER; note = bicyclic nucleic acid (BNA)
  source 1..20: mol_type = other RNA
tcaaggaagatggcatttct

SEQ ID NO: 10794 - RNA, 20 nt, synthetic construct
  misc_feature 1..20: note = Description of Artificial Sequence: Synthetic Antisense oligonucleotide
  modified_base 12: mod_base = OTHER; note = bicyclic nucleic acid (BNA)
  modified_base 19: mod_base = OTHER; note = bicyclic nucleic acid (BNA)
  source 1..20: mol_type = other RNA
tcaaggaagatggcatttct

SEQ ID NO: 10795 - RNA, 20 nt, synthetic construct
  misc_feature 1..20: note = Description of Artificial Sequence: Synthetic Antisense oligonucleotide
  modified_base 12: mod_base = OTHER; note = bicyclic nucleic acid (BNA)
  modified_base 14: mod_base = OTHER; note = bicyclic nucleic acid (BNA)
  source 1..20: mol_type = other RNA
tcaaggaagatggcatttct

SEQ ID NO: 10796 - RNA, 20 nt, synthetic construct
  misc_feature 1..20: note = Description of Artificial Sequence: Synthetic Antisense oligonucleotide
  modified_base 6: mod_base = OTHER; note = bicyclic nucleic acid (BNA)
  modified_base 12: mod_base = OTHER; note = bicyclic nucleic acid (BNA)
  source 1..20: mol_type = other RNA
tcaaggaagatggcatttct

SEQ ID NO: 10797 - RNA, 20 nt, synthetic construct
  misc_feature 1..20: note = Description of Artificial Sequence: Synthetic Antisense oligonucleotide
  modified_base 5..6: mod_base = OTHER; note = bicyclic nucleic acid (BNA)
  source 1..20: mol_type = other RNA
tcaaggaagatggcatttct

SEQ ID NO: 10798 - RNA, 20 nt, synthetic construct
  misc_feature 1..20: note = Description of Artificial Sequence: Synthetic Antisense oligonucleotide
  modified_base 2: mod_base = OTHER; note = bicyclic nucleic acid (BNA)
  modified_base 14: mod_base = OTHER; note = bicyclic nucleic acid (BNA)
  source 1..20: mol_type = other RNA
tcaaggaagatggcatttct

SEQ ID NO: 10799 - RNA, 20 nt, synthetic construct
  misc_feature 1..20: note = Description of Artificial Sequence: Synthetic Antisense oligonucleotide
  modified_base 9: mod_base = OTHER; note = bicyclic nucleic acid (BNA)
  modified_base 12: mod_base = OTHER; note = bicyclic nucleic acid (BNA)
  source 1..20: mol_type = other RNA
tcaaggaagatggcatttct

SEQ ID NO: 10800 - RNA, 20 nt, synthetic construct
  misc_feature 1..20: note = Description of Artificial Sequence: Synthetic Antisense oligonucleotide
  modified_base 2: mod_base = OTHER; note = bicyclic nucleic acid (BNA)
  modified_base 5: mod_base = OTHER; note = bicyclic nucleic acid (BNA)
  source 1..20: mol_type = other RNA
tcaaggaagatggcatttct

SEQ ID NO: 10801 - RNA, 20 nt, synthetic construct
  misc_feature 1..20: note = Description of Artificial Sequence: Synthetic Antisense oligonucleotide
  modified_base 13: mod_base = OTHER; note = bicyclic nucleic acid (BNA)
  modified_base 19: mod_base = OTHER; note = bicyclic nucleic acid (BNA)
  source 1..20: mol_type = other RNA
tcaaggaagatggcatttct

SEQ ID NO: 10802 - RNA, 20 nt, synthetic construct
  misc_feature 1..20: note = Description of Artificial Sequence: Synthetic Antisense oligonucleotide
  modified_base 12..13: mod_base = OTHER; note = bicyclic nucleic acid (BNA)
  source 1..20: mol_type = other RNA
tcaaggaagatggcatttct

SEQ ID NO: 10803 - RNA, 20 nt, synthetic construct
  misc_feature 1..20: note = Description of Artificial Sequence: Synthetic Antisense oligonucleotide
  modified_base 5: mod_base = OTHER; note = bicyclic nucleic acid (BNA)
  modified_base 12: mod_base = OTHER; note = bicyclic nucleic acid (BNA)
  source 1..20: mol_type = other RNA
tcaaggaagatggcatttct

SEQ ID NO: 10804 - RNA, 20 nt, synthetic construct
  misc_feature 1..20: note = Description of Artificial Sequence: Synthetic Antisense oligonucleotide
  modified_base 2: mod_base = OTHER; note = bicyclic nucleic acid (BNA)
  modified_base 13: mod_base = OTHER; note = bicyclic nucleic acid (BNA)
  source 1..20: mol_type = other RNA
tcaaggaagatggcatttct

SEQ ID NO: 10805 - RNA, 20 nt, synthetic construct
  misc_feature 1..20: note = Description of Artificial Sequence: Synthetic Antisense oligonucleotide
  modified_base 9: mod_base = OTHER; note = bicyclic nucleic acid (BNA)
  modified_base 13: mod_base = OTHER; note = bicyclic nucleic acid (BNA)
  source 1..20: mol_type = other RNA
tcaaggaagatggcatttct

SEQ ID NO: 10806 - RNA, 20 nt, synthetic construct
  misc_feature 1..20: note = Description of Artificial Sequence: Synthetic Antisense oligonucleotide
  modified_base 2: mod_base = OTHER; note = bicyclic nucleic acid (BNA)
  modified_base 19: mod_base = OTHER; note = bicyclic nucleic acid (BNA)
  source 1..20: mol_type = other RNA
tcaaggaagatggcatttct

SEQ ID NO: 10807 - RNA, 20 nt, synthetic construct
  misc_feature 1..20: note = Description of Artificial Sequence: Synthetic Antisense oligonucleotide
  modified_base 2: mod_base = OTHER; note = bicyclic nucleic acid (BNA)
  modified_base 9: mod_base = OTHER; note = bicyclic nucleic acid (BNA)
  source 1..20: mol_type = other RNA
tcaaggaagatggcatttct

SEQ ID NO: 10808 - RNA, 20 nt, synthetic construct
  misc_feature 1..20: note = Description of Artificial Sequence: Synthetic Antisense oligonucleotide
  modified_base 14: mod_base = OTHER; note = bicyclic nucleic acid (BNA)
  modified_base 19: mod_base = OTHER; note = bicyclic nucleic acid (BNA)
  source 1..20: mol_type = other RNA
tcaaggaagatggcatttct

SEQ ID NO: 10809 - RNA, 20 nt, synthetic construct
  misc_feature 1..20: note = Description of Artificial Sequence: Synthetic Antisense oligonucleotide
  modified_base 9: mod_base = OTHER; note = bicyclic nucleic acid (BNA)
  modified_base 19: mod_base = OTHER; note = bicyclic nucleic acid (BNA)
  source 1..20: mol_type = other RNA
tcaaggaagatggcatttct

SEQ ID NO: 10810 - RNA, 22 nt, synthetic construct
  misc_feature 1..22: note = Description of Artificial Sequence: Synthetic Antisense oligonucleotide
  modified_base 9: mod_base = OTHER; note = bicyclic nucleic acid (BNA)
  modified_base 14: mod_base = OTHER; note = bicyclic nucleic acid (BNA)
  source 1..22: mol_type = other RNA
tcaaggaagatggcatttctag

SEQ ID NO: 10811 - RNA, 22 nt, synthetic construct
  misc_feature 1..22: note = Description of Artificial Sequence: Synthetic Antisense oligonucleotide
  modified_base 5: mod_base = OTHER; note = bicyclic nucleic acid (BNA)
  modified_base 9: mod_base = OTHER; note = bicyclic nucleic acid (BNA)
  source 1..22: mol_type = other RNA
tcaaggaagatggcatttctag

SEQ ID NO: 10812 - RNA, 22 nt, synthetic construct
  misc_feature 1..22: note = Description of Artificial Sequence: Synthetic Antisense oligonucleotide
  modified_base 5: mod_base = OTHER; note = bicyclic nucleic acid (BNA)
  modified_base 19: mod_base = OTHER; note = bicyclic nucleic acid (BNA)
  source 1..22: mol_type = other RNA
tcaaggaagatggcatttctag

SEQ ID NO: 10813 - RNA, 22 nt, synthetic construct
  misc_feature 1..22: note = Description of Artificial Sequence: Synthetic Antisense oligonucleotide
  modified_base 6: mod_base = OTHER; note = bicyclic nucleic acid (BNA)
  modified_base 14: mod_base = OTHER; note = bicyclic nucleic acid (BNA)
  source 1..22: mol_type = other RNA
tcaaggaagatggcatttctag

SEQ ID NO: 10814 - RNA, 22 nt, synthetic construct
  misc_feature 1..22: note = Description of Artificial Sequence: Synthetic Antisense oligonucleotide
  modified_base 5: mod_base = OTHER; note = bicyclic nucleic acid (BNA)
  modified_base 13: mod_base = OTHER; note = bicyclic nucleic acid (BNA)
  source 1..22: mol_type = other RNA
tcaaggaagatggcatttctag

SEQ ID NO: 10815 - RNA, 22 nt, synthetic construct
  misc_feature 1..22: note = Description of Artificial Sequence: Synthetic Antisense oligonucleotide
  modified_base 2: mod_base = OTHER; note = bicyclic nucleic acid (BNA)
  modified_base 12: mod_base = OTHER; note = bicyclic nucleic acid (BNA)
  source 1..22: mol_type = other RNA
tcaaggaagatggcatttctag

SEQ ID NO: 10816 - RNA, 22 nt, synthetic construct
  misc_feature 1..22: note = Description of Artificial Sequence: Synthetic Antisense oligonucleotide
  modified_base 6: mod_base = OTHER; note = bicyclic nucleic acid (BNA)
  modified_base 9: mod_base = OTHER; note = bicyclic nucleic acid (BNA)
  source 1..22: mol_type = other RNA
tcaaggaagatggcatttctag

SEQ ID NO: 10817 - RNA, 22 nt, synthetic construct
  misc_feature 1..22: note = Description of Artificial Sequence: Synthetic Antisense oligonucleotide
  modified_base 13..14: mod_base = OTHER; note = bicyclic nucleic acid (BNA)
  source 1..22: mol_type = other RNA
tcaaggaagatggcatttctag

SEQ ID NO: 10818 - RNA, 22 nt, synthetic construct
  misc_feature 1..22: note = Description of Artificial Sequence: Synthetic Antisense oligonucleotide
  modified_base 6: mod_base = OTHER; note = bicyclic nucleic acid (BNA)
  modified_base 13: mod_base = OTHER; note = bicyclic nucleic acid (BNA)
  source 1..22: mol_type = other RNA
tcaaggaagatggcatttctag

SEQ ID NO: 10819 - RNA, 22 nt, synthetic construct
  misc_feature 1..22: note = Description of Artificial Sequence: Synthetic Antisense oligonucleotide
  modified_base 6: mod_base = OTHER; note = bicyclic nucleic acid (BNA)
  modified_base 19: mod_base = OTHER; note = bicyclic nucleic acid (BNA)
  source 1..22: mol_type = other RNA
tcaaggaagatggcatttctag

SEQ ID NO: 10820 - RNA, 22 nt, synthetic construct
  misc_feature 1..22: note = Description of Artificial Sequence: Synthetic Antisense oligonucleotide
  modified_base 5: mod_base = OTHER; note = bicyclic nucleic acid (BNA)
  modified_base 14: mod_base = OTHER; note = bicyclic nucleic acid (BNA)
  source 1..22: mol_type = other RNA
tcaaggaagatggcatttctag

SEQ ID NO: 10821 - RNA, 22 nt, synthetic construct
  misc_feature 1..22: note = Description of Artificial Sequence: Synthetic Antisense oligonucleotide
  modified_base 2: mod_base = OTHER; note = bicyclic nucleic acid (BNA)
  modified_base 6: mod_base = OTHER; note = bicyclic nucleic acid (BNA)
  source 1..22: mol_type = other RNA
tcaaggaagatggcatttctag

SEQ ID NO: 10822 - RNA, 22 nt, synthetic construct
  misc_feature 1..22: note = Description of Artificial Sequence: Synthetic Antisense oligonucleotide
  modified_base 12: mod_base = OTHER; note = bicyclic nucleic acid (BNA)
  modified_base 19: mod_base = OTHER; note = bicyclic nucleic acid (BNA)
  source 1..22: mol_type = other RNA
tcaaggaagatggcatttctag

SEQ ID NO: 10823 - RNA, 22 nt, synthetic construct
  misc_feature 1..22: note = Description of Artificial Sequence: Synthetic Antisense oligonucleotide
  modified_base 12: mod_base = OTHER; note = bicyclic nucleic acid (BNA)
  modified_base 14: mod_base = OTHER; note = bicyclic nucleic acid (BNA)
  source 1..22: mol_type = other RNA
tcaaggaagatggcatttctag

SEQ ID NO: 10824 - RNA, 22 nt, synthetic construct
  misc_feature 1..22: note = Description of Artificial Sequence: Synthetic Antisense oligonucleotide
  modified_base 6: mod_base = OTHER; note = bicyclic nucleic acid (BNA)
  modified_base 12: mod_base = OTHER; note = bicyclic nucleic acid (BNA)
  source 1..22: mol_type = other RNA
tcaaggaagatggcatttctag

SEQ ID NO: 10825 - RNA, 22 nt, synthetic construct
  misc_feature 1..22: note = Description of Artificial Sequence: Synthetic Antisense oligonucleotide
  modified_base 5..6: mod_base = OTHER; note = bicyclic nucleic acid (BNA)
  source 1..22: mol_type = other RNA
tcaaggaagatggcatttctag

SEQ ID NO: 10826 - RNA, 22 nt, synthetic construct
  misc_feature 1..22: note = Description of Artificial Sequence: Synthetic Antisense oligonucleotide
  modified_base 2: mod_base = OTHER; note = bicyclic nucleic acid (BNA)
  modified_base 14: mod_base = OTHER; note = bicyclic nucleic acid (BNA)
  source 1..22: mol_type = other RNA
tcaaggaagatggcatttctag

SEQ ID NO: 10827 - RNA, 22 nt, synthetic construct
  misc_feature 1..22: note = Description of Artificial Sequence: Synthetic Antisense oligonucleotide
  modified_base 9: mod_base = OTHER; note = bicyclic nucleic acid (BNA)
  modified_base 12: mod_base = OTHER; note = bicyclic nucleic acid (BNA)
  source 1..22: mol_type = other RNA
tcaaggaagatggcatttctag

SEQ ID NO: 10828 - RNA, 22 nt, synthetic construct
  misc_feature 1..22: note = Description of Artificial Sequence: Synthetic Antisense oligonucleotide
  modified_base 2: mod_base = OTHER; note = bicyclic nucleic acid (BNA)
  modified_base 5: mod_base = OTHER; note = bicyclic nucleic acid (BNA)
  source 1..22: mol_type = other RNA
tcaaggaagatggcatttctag

SEQ ID NO: 10829 - RNA, 22 nt, synthetic construct
  misc_feature 1..22: note = Description of Artificial Sequence: Synthetic Antisense oligonucleotide
  modified_base 13: mod_base = OTHER; note = bicyclic nucleic acid (BNA)
  modified_base 19: mod_base = OTHER; note = bicyclic nucleic acid (BNA)
  source 1..22: mol_type = other RNA
tcaaggaagatggcatttctag

SEQ ID NO: 10830 - RNA, 22 nt, synthetic construct
  misc_feature 1..22: note = Description of Artificial Sequence: Synthetic Antisense oligonucleotide
  modified_base 12..13: mod_base = OTHER; note = bicyclic nucleic acid (BNA)
  source 1..22: mol_type = other RNA
tcaaggaagatggcatttctag

SEQ ID NO: 10831 - RNA, 22 nt, synthetic construct
  misc_feature 1..22: note = Description of Artificial Sequence: Synthetic Antisense oligonucleotide
  modified_base 5: mod_base = OTHER; note = bicyclic nucleic acid (BNA)
  modified_base 12: mod_base = OTHER; note = bicyclic nucleic acid (BNA)
  source 1..22: mol_type = other RNA
tcaaggaagatggcatttctag

SEQ ID NO: 10832 - RNA, 22 nt, synthetic construct
  misc_feature 1..22: note = Description of Artificial Sequence: Synthetic Antisense oligonucleotide
  modified_base 2: mod_base = OTHER; note = bicyclic nucleic acid (BNA)
  modified_base 13: mod_base = OTHER; note = bicyclic nucleic acid (BNA)
  source 1..22: mol_type = other RNA
tcaaggaagatggcatttctag

SEQ ID NO: 10833 - RNA, 22 nt, synthetic construct
  misc_feature 1..22: note = Description of Artificial Sequence: Synthetic Antisense oligonucleotide
  modified_base 9: mod_base = OTHER; note = bicyclic nucleic acid (BNA)
  modified_base 13: mod_base = OTHER; note = bicyclic nucleic acid (BNA)
  source 1..22: mol_type = other RNA
tcaaggaagatggcatttctag

SEQ ID NO: 10834 - RNA, 22 nt, synthetic construct
  misc_feature 1..22: note = Description of Artificial Sequence: Synthetic Antisense oligonucleotide
  modified_base 2: mod_base = OTHER; note = bicyclic nucleic acid (BNA)
  modified_base 19: mod_base = OTHER; note = bicyclic nucleic acid (BNA)
  source 1..22: mol_type = other RNA
tcaaggaagatggcatttctag

SEQ ID NO: 10835 - RNA, 22 nt, synthetic construct
  misc_feature 1..22: note = Description of Artificial Sequence: Synthetic Antisense oligonucleotide
  modified_base 2: mod_base = OTHER; note = bicyclic nucleic acid (BNA)
  modified_base 9: mod_base = OTHER; note = bicyclic nucleic acid (BNA)
  source 1..22: mol_type = other RNA
tcaaggaagatggcatttctag

SEQ ID NO: 10836 - RNA, 22 nt, synthetic construct
  misc_feature 1..22: note = Description of Artificial Sequence: Synthetic Antisense oligonucleotide
  modified_base 14: mod_base = OTHER; note = bicyclic nucleic acid (BNA)
  modified_base 19: mod_base = OTHER; note = bicyclic nucleic acid (BNA)
  source 1..22: mol_type = other RNA
tcaaggaagatggcatttctag

SEQ ID NO: 10837 - RNA, 22 nt, synthetic construct
  misc_feature 1..22: note = Description of Artificial Sequence: Synthetic Antisense oligonucleotide
  modified_base 9: mod_base = OTHER; note = bicyclic nucleic acid (BNA)
  modified_base 19: mod_base = OTHER; note = bicyclic nucleic acid (BNA)
  source 1..22: mol_type = other RNA
tcaaggaagatggcatttctag

SEQ ID NO: 10838 - RNA, 18 nt, synthetic construct
  misc_feature 1..18: note = Description of Artificial Sequence: Synthetic Antisense oligonucleotide
  modified_base 2: mod_base = OTHER; note = bicyclic nucleic acid (BNA)
  modified_base 9: mod_base = OTHER; note = 5-methyl
  modified_base 13..14: mod_base = OTHER; note = 5-methyl
  modified_base 18: mod_base = OTHER; note = 5-methyl
  source 1..18: mol_type = other RNA
ggtaagttctgtccaagc

SEQ ID NO: 10839 - RNA, 18 nt, synthetic construct
  misc_feature 1..18: note = Description of Artificial Sequence: Synthetic Antisense oligonucleotide
  modified_base 9: mod_base = OTHER; note = 5-methyl
  modified_base 13..14: mod_base = OTHER; note = 5-methyl
  modified_base 18: mod_base = OTHER; note = 5-methyl
  modified_base 9: mod_base = OTHER; note = bicyclic nucleic acid (BNA)
  source 1..18: mol_type = other RNA
ggtaagttctgtccaagc

SEQ ID NO: 10840 - RNA, 18 nt, synthetic construct
  misc_feature 1..18: note = Description of Artificial Sequence: Synthetic Antisense oligonucleotide
  modified_base 9: mod_base = OTHER; note = 5-methyl
  modified_base 13..14: mod_base = OTHER; note = 5-methyl
  modified_base 18: mod_base = OTHER; note = 5-methyl
  modified_base 11: mod_base = OTHER; note = bicyclic nucleic acid (BNA)
  source 1..18: mol_type = other RNA
ggtaagttctgtccaagc

SEQ ID NO: 10841 - RNA, 18 nt, synthetic construct
  misc_feature 1..18: note = Description of Artificial Sequence: Synthetic Antisense oligonucleotide
  modified_base 6: mod_base = OTHER; note = bicyclic nucleic acid (BNA)
  modified_base 9: mod_base = OTHER; note = 5-methyl
  modified_base 13..14: mod_base = OTHER; note = 5-methyl
  modified_base 18: mod_base = OTHER; note = 5-methyl
  source 1..18: mol_type = other RNA
ggtaagttctgtccaagc

SEQ ID NO: 10842 - RNA, 18 nt, synthetic construct
  misc_feature 1..18: note = Description of Artificial Sequence: Synthetic Antisense oligonucleotide
  modified_base 9: mod_base = OTHER; note = 5-methyl
  modified_base 13..14: mod_base = OTHER; note = 5-methyl
  modified_base 18: mod_base = OTHER; note = 5-methyl
  modified_base 17: mod_base = OTHER; note = bicyclic nucleic acid (BNA)
  source 1..18: mol_type = other RNA
ggtaagttctgtccaagc

SEQ ID NO: 10843 - RNA, 18 nt, synthetic construct
  misc_feature 1..18: note = Description of Artificial Sequence: Synthetic Antisense oligonucleotide
  modified_base 9: mod_base = OTHER; note = 5-methyl
  modified_base 13..14: mod_base = OTHER; note = 5-methyl
  modified_base 18: mod_base = OTHER; note = 5-methyl
  modified_base 13: mod_base = OTHER; note = bicyclic nucleic acid (BNA)
  source 1..18: mol_type = other RNA
ggtaagttctgtccaagc

SEQ ID NO: 10844 - RNA, 18 nt, synthetic construct
  misc_feature 1..18: note = Description of Artificial Sequence: Synthetic Antisense oligonucleotide
  modified_base 9: mod_base = OTHER; note = 5-methyl
  modified_base 13..14: mod_base = OTHER; note = 5-methyl
  modified_base 18: mod_base = OTHER; note = 5-methyl
  modified_base 14: mod_base = OTHER; note = bicyclic nucleic acid (BNA)
  source 1..18: mol_type = other RNA
ggtaagttctgtccaagc

SEQ ID NO: 10845 - RNA, 18 nt, synthetic construct
  misc_feature 1..18: note = Description of Artificial Sequence: Synthetic Antisense oligonucleotide
  modified_base 8: mod_base = OTHER; note = 5-methyl
  modified_base 12..13: mod_base = OTHER; note = 5-methyl
  modified_base 17..18: mod_base = OTHER; note = 5-methyl
  modified_base 16: mod_base = OTHER; note = bicyclic nucleic acid (BNA)
  source 1..18: mol_type = other RNA
gtaagttctgtccaagcc

SEQ ID NO: 10846 - RNA, 18 nt, synthetic construct
  misc_feature 1..18: note = Description of Artificial Sequence: Synthetic Antisense oligonucleotide
  modified_base 8: mod_base = OTHER; note = 5-methyl
  modified_base 12..13: mod_base = OTHER; note = 5-methyl
  modified_base 17..18: mod_base = OTHER; note = 5-methyl
  modified_base 10: mod_base = OTHER; note = bicyclic nucleic acid (BNA)
  source 1..18: mol_type = other RNA
gtaagttctgtccaagcc

SEQ ID NO: 10847 - RNA, 18 nt, synthetic construct
  misc_feature 1..18: note = Description of Artificial Sequence: Synthetic Antisense oligonucleotide
  modified_base 5: mod_base = OTHER; note = bicyclic nucleic acid (BNA)
  modified_base 8: mod_base = OTHER; note = 5-methyl
  modified_base 12..13: mod_base = OTHER; note = 5-methyl
  modified_base 17..18: mod_base = OTHER; note = 5-methyl
  source 1..18: mol_type = other RNA
gtaagttctgtccaagcc

SEQ ID NO: 10848 - RNA, 18 nt, synthetic construct
  misc_feature 1..18: note = Description of Artificial Sequence: Synthetic Antisense oligonucleotide
  modified_base 8: mod_base = OTHER; note = 5-methyl
  modified_base 12..13: mod_base = OTHER; note = 5-methyl
  modified_base 17..18: mod_base = OTHER; note = 5-methyl
  modified_base 17: mod_base = OTHER; note = bicyclic nucleic acid (BNA)
  source 1..18: mol_type = other RNA
gtaagttctgtccaagcc

SEQ ID NO: 10849 - RNA, 18 nt, synthetic construct
  misc_feature 1..18: note = Description of Artificial Sequence: Synthetic Antisense oligonucleotide
  modified_base 8: mod_base = OTHER; note = 5-methyl
  modified_base 12..13: mod_base = OTHER; note = 5-methyl
  modified_base 17..18: mod_base = OTHER; note = 5-methyl
  modified_base 12: mod_base = OTHER; note = bicyclic nucleic acid (BNA)
  source 1..18: mol_type = other RNA
gtaagttctgtccaagcc

SEQ ID NO: 10850 - RNA, 18 nt, synthetic construct
  misc_feature 1..18: note = Description of Artificial Sequence: Synthetic Antisense oligonucleotide
  modified_base 8: mod_base = OTHER; note = 5-methyl
  modified_base 12..13: mod_base = OTHER; note = 5-methyl
  modified_base 17..18: mod_base = OTHER; note = 5-methyl
  modified_base 13: mod_base = OTHER; note = bicyclic nucleic acid (BNA)
  source 1..18: mol_type = other RNA
gtaagttctgtccaagcc

SEQ ID NO: 10851 - RNA, 18 nt, synthetic construct
  misc_feature 1..18: note = Description of Artificial Sequence: Synthetic Antisense oligonucleotide
  modified_base 8: mod_base = OTHER; note = 5-methyl
  modified_base 12..13: mod_base = OTHER; note = 5-methyl
  modified_base 17..18: mod_base = OTHER; note = 5-methyl
  modified_base 8: mod_base = OTHER; note = bicyclic nucleic acid (BNA)
  source 1..18: mol_type = other RNA
gtaagttctgtccaagcc

SEQ ID NO: 10852 - RNA, 18 nt, synthetic construct
  misc_feature 1..18: note = Description of Artificial Sequence: Synthetic Antisense oligonucleotide
  modified_base 2: mod_base = OTHER; note = bicyclic nucleic acid (BNA)
  modified_base 4: mod_base = OTHER; note = 5-methyl
  modified_base 13: mod_base = OTHER; note = 5-methyl
  modified_base 17..18: mod_base = OTHER; note = 5-methyl
  source 1..18: mol_type = other RNA
agtcggtaagttctgtcc

SEQ ID NO: 10853 - RNA, 18 nt, synthetic construct
  misc_feature 1..18: note = Description of Artificial Sequence: Synthetic Antisense oligonucleotide
  modified_base 4: mod_base = OTHER; note = 5-methyl
  modified_base 13: mod_base = OTHER; note = 5-methyl
  modified_base 17..18: mod_base = OTHER; note = 5-methyl
  modified_base 4: mod_base = OTHER; note = bicyclic nucleic acid (BNA)
  source 1..18: mol_type = other RNA
agtcggtaagttctgtcc

SEQ ID NO: 10854 - RNA, 18 nt, synthetic construct
  misc_feature 1..18: note = Description of Artificial Sequence: Synthetic Antisense oligonucleotide
  modified_base 4: mod_base = OTHER; note = 5-methyl
  modified_base 13: mod_base = OTHER; note = 5-methyl
  modified_base 17..18: mod_base = OTHER; note = 5-methyl
  modified_base 10: mod_base = OTHER; note = bicyclic nucleic acid (BNA)
  source 1..18: mol_type = other RNA
agtcggtaagttctgtcc

SEQ ID NO: 10855 - RNA, 18 nt, synthetic construct
  misc_feature 1..18: note = Description of Artificial Sequence: Synthetic Antisense oligonucleotide
  modified_base 4: mod_base = OTHER; note = 5-methyl
  modified_base 13: mod_base = OTHER; note = 5-methyl
  modified_base 17..18: mod_base = OTHER; note = 5-methyl
  modified_base 5: mod_base = OTHER; note = bicyclic nucleic acid (BNA)
  source 1..18: mol_type = other RNA
agtcggtaagttctgtcc

SEQ ID NO: 10856 - RNA, 18 nt, synthetic construct
  misc_feature 1..18: note = Description of Artificial Sequence: Synthetic Antisense oligonucleotide
  modified_base 4: mod_base = OTHER; note = 5-methyl
  modified_base 13: mod_base = OTHER; note = 5-methyl
  modified_base 17..18: mod_base = OTHER; note = 5-methyl
  modified_base 6: mod_base = OTHER; note = bicyclic nucleic acid (BNA)
  source 1..18: mol_type = other RNA
agtcggtaagttctgtcc

SEQ ID NO: 10857 - RNA, 18 nt, synthetic construct
  misc_feature 1..18: note = Description of Artificial Sequence: Synthetic Antisense oligonucleotide
  modified_base 4: mod_base = OTHER; note = 5-methyl
  modified_base 13: mod_base = OTHER; note = 5-methyl
  modified_base 17..18: mod_base = OTHER; note = 5-methyl
  modified_base 17: mod_base = OTHER; note = bicyclic nucleic acid (BNA)
  source 1..18: mol_type = other RNA
agtcggtaagttctgtcc

SEQ ID NO: 10858 - RNA, 18 nt, synthetic construct
  misc_feature 1..18: note = Description of Artificial Sequence: Synthetic Antisense oligonucleotide
  modified_base 4: mod_base = OTHER; note = 5-methyl
  modified_base 13: mod_base = OTHER; note = 5-methyl
  modified_base 17..18: mod_base = OTHER; note = 5-methyl
  modified_base 13: mod_base = OTHER; note = bicyclic nucleic acid (BNA)
  source 1..18: mol_type = other RNA
agtcggtaagttctgtcc

SEQ ID NO: 10859 - RNA, 18 nt, synthetic construct
  misc_feature 1..18: note = Description of Artificial Sequence: Synthetic Antisense oligonucleotide
  modified_base 4: mod_base = OTHER; note = 5-methyl
  modified_base 13: mod_base = OTHER; note = 5-methyl
  modified_base 17..18: mod_base = OTHER; note = 5-methyl
  modified_base 15: mod_base = OTHER; note = bicyclic nucleic acid (BNA)
  source 1..18: mol_type = other RNA
agtcggtaagttctgtcc

SEQ ID NO: 10860 - RNA, 18 nt, synthetic construct
  misc_feature 1..18: note = Description of Artificial Sequence: Synthetic Antisense oligonucleotide
  modified_base 1: mod_base = OTHER; note = 5-methyl
  modified_base 5..6: mod_base = OTHER; note = 5-methyl
  modified_base 10..12: mod_base = OTHER; note = 5-methyl
  modified_base 3: mod_base = OTHER; note = bicyclic nucleic acid (BNA)
  source 1..18: mol_type = other RNA
ctgtccaagcccggttga

SEQ ID NO: 10861 - RNA, 18 nt, synthetic construct
  misc_feature 1..18: note = Description of Artificial Sequence: Synthetic Antisense oligonucleotide
  modified_base 1: mod_base = OTHER; note = 5-methyl
  modified_base 5..6: mod_base = OTHER; note = 5-methyl
  modified_base 10..12: mod_base = OTHER; note = 5-methyl
  modified_base 9: mod_base = OTHER; note = bicyclic nucleic acid (BNA)
  source 1..18: mol_type = other RNA
ctgtccaagcccggttga

SEQ ID NO: 10862 - RNA, 18 nt, synthetic construct
  misc_feature 1..18: note = Description of Artificial Sequence: Synthetic Antisense oligonucleotide
  modified_base 1: mod_base = OTHER; note = 5-methyl
  modified_base 5..6: mod_base = OTHER; note = 5-methyl
  modified_base 10..12: mod_base = OTHER; note = 5-methyl
  modified_base 10: mod_base = OTHER; note = bicyclic nucleic acid (BNA)
  source 1..18: mol_type = other RNA
ctgtccaagcccggttga

SEQ ID NO: 10863 - RNA, 18 nt, synthetic construct
  misc_feature 1..18: note = Description of Artificial Sequence: Synthetic Antisense oligonucleotide
  modified_base 1: mod_base = OTHER; note = 5-methyl
  modified_base 5..6: mod_base = OTHER; note = 5-methyl
  modified_base 10..12: mod_base = OTHER; note = 5-methyl
  modified_base 5: mod_base = OTHER; note = bicyclic nucleic acid (BNA)
  source 1..18: mol_type = other RNA
ctgtccaagcccggttga

SEQ ID NO: 10864 - RNA, 18 nt, synthetic construct
  misc_feature 1..18: note = Description of Artificial Sequence: Synthetic Antisense oligonucleotide
  modified_base 1: mod_base = OTHER; note = 5-methyl
  modified_base 5..6: mod_base = OTHER; note = 5-methyl
  modified_base 10..12: mod_base = OTHER; note = 5-methyl
  modified_base 11: mod_base = OTHER; note = bicyclic nucleic acid (BNA)
  source 1..18: mol_type = other RNA
ctgtccaagcccggttga

SEQ ID NO: 10865 - RNA, 18 nt, synthetic construct
  misc_feature 1..18: note = Description of Artificial Sequence: Synthetic Antisense oligonucleotide
  modified_base 1: mod_base = OTHER; note = 5-methyl
  modified_base 5..6: mod_base = OTHER; note = 5-methyl
  modified_base 10..12: mod_base = OTHER; note = 5-methyl
  modified_base 6: mod_base = OTHER; note = bicyclic nucleic acid (BNA)
  source 1..18: mol_type = other RNA
ctgtccaagcccggttga

SEQ ID NO: 10866 - RNA, 18 nt, synthetic construct
  misc_feature 1..18: note = Description of Artificial Sequence: Synthetic Antisense oligonucleotide
  modified_base 1: mod_base = OTHER; note = 5-methyl
  modified_base 5..6: mod_base = OTHER; note = 5-methyl
  modified_base 10..12: mod_base = OTHER; note = 5-methyl
  modified_base 17: mod_base = OTHER; note = bicyclic nucleic acid (BNA)
  source 1..18: mol_type = other RNA
ctgtccaagcccggttga

SEQ ID NO: 10867 - RNA, 18 nt, synthetic construct
  misc_feature 1..18: note = Description of Artificial Sequence: Synthetic Antisense oligonucleotide
  modified_base 1: mod_base = OTHER; note = 5-methyl
  modified_base 5..6: mod_base = OTHER; note = 5-methyl
  modified_base 10..12: mod_base = OTHER; note = 5-methyl
  modified_base 12: mod_base = OTHER; note = bicyclic nucleic acid (BNA)
  source 1..18: mol_type = other RNA
ctgtccaagcccggttga

SEQ ID NO: 10868 - RNA, 18 nt, synthetic construct
  misc_feature 1..18: note = Description of Artificial Sequence: Synthetic Antisense oligonucleotide
  modified_base 1: mod_base = OTHER; note = 5-methyl
  modified_base 5..6: mod_base = OTHER; note = 5-methyl
  modified_base 10..12: mod_base = OTHER; note = 5-methyl
  modified_base 13: mod_base = OTHER; note = bicyclic nucleic acid (BNA)
  source 1..18: mol_type = other RNA
ctgtccaagcccggttga

SEQ ID NO: 10869 - RNA, 18 nt, synthetic construct
  misc_feature 1..18: note = Description of Artificial Sequence: Synthetic Antisense oligonucleotide
  modified_base 1: mod_base = OTHER; note = 5-methyl
  modified_base 5..6: mod_base = OTHER; note = 5-methyl
  modified_base 10..12: mod_base = OTHER; note = 5-methyl
  modified_base 14: mod_base = OTHER; note = bicyclic nucleic acid (BNA)
  source 1..18: mol_type = other RNA
ctgtccaagcccggttga

SEQ ID NO: 10870 - RNA, 18 nt, synthetic construct
  misc_feature 1..18: note = Description of Artificial Sequence: Synthetic Antisense oligonucleotide
  modified_base 9: mod_base = OTHER; note = 5-methyl
  modified_base 13..14: mod_base = OTHER; note = 5-methyl
  modified_base 18: mod_base = OTHER; note = 5-methyl
  modified_base 9: mod_base = OTHER; note = bicyclic nucleic acid (BNA)
  modified_base 14: mod_base = OTHER; note = bicyclic nucleic acid (BNA)
  source 1..18: mol_type = other RNA
ggtaagttctgtccaagc

SEQ ID NO: 10871 - RNA, 18 nt, synthetic construct
  misc_feature 1..18: note = Description of Artificial Sequence: Synthetic Antisense oligonucleotide
  modified_base 6: mod_base = OTHER; note = bicyclic nucleic acid (BNA)
  modified_base 14: mod_base = OTHER; note = bicyclic nucleic acid (BNA)
  modified_base 9: mod_base = OTHER; note = 5-methyl
  modified_base 13..14: mod_base = OTHER; note = 5-methyl
  modified_base 18: mod_base = OTHER; note = 5-methyl
  source 1..18: mol_type = other RNA
ggtaagttctgtccaagc

SEQ ID NO: 10872 - RNA, 18 nt, synthetic construct
  misc_feature 1..18: note = Description of Artificial Sequence: Synthetic Antisense oligonucleotide
  modified_base 9: mod_base = OTHER; note = 5-methyl
  modified_base 13..14: mod_base = OTHER; note = 5-methyl
  modified_base 18: mod_base = OTHER; note = 5-methyl
  modified_base 13: mod_base = OTHER; note = bicyclic nucleic acid (BNA)
  modified_base 17: mod_base = OTHER; note = bicyclic nucleic acid (BNA)
  source 1..18: mol_type = other RNA
ggtaagttctgtccaagc

SEQ ID NO: 10873 - RNA, 18 nt, synthetic construct
  misc_feature 1..18: note = Description of Artificial Sequence: Synthetic Antisense oligonucleotide
  modified_base 6: mod_base = OTHER; note = bicyclic nucleic acid (BNA)
  modified_base 9: mod_base = OTHER; note = bicyclic nucleic acid (BNA)
  modified_base 9: mod_base = OTHER; note = 5-methyl
  modified_base 13..14: mod_base = OTHER; note = 5-methyl
  modified_base 18: mod_base = OTHER; note = 5-methyl
  source 1..18: mol_type = other RNA
ggtaagttctgtccaagc

SEQ ID NO: 10874 - RNA, 18 nt, synthetic construct
  misc_feature 1..18: note = Description of Artificial Sequence: Synthetic Antisense oligonucleotide
  modified_base 9: mod_base = OTHER; note = 5-methyl
  modified_base 13..14: mod_base = OTHER; note = 5-methyl
  modified_base 18: mod_base = OTHER; note = 5-methyl
  modified_base 13..14: mod_base = OTHER; note = bicyclic nucleic acid (BNA)
  source 1..18: mol_type = other RNA
ggtaagttctgtccaagc

SEQ ID NO: 10875 - RNA, 18 nt, synthetic construct
  misc_feature 1..18: note = Description of Artificial Sequence: Synthetic Antisense oligonucleotide
  modified_base 2: mod_base = OTHER; note = bicyclic nucleic acid (BNA)
  modified_base 17: mod_base = OTHER; note = bicyclic nucleic acid (BNA)
  modified_base 9: mod_base = OTHER; note = 5-methyl
  modified_base 13..14: mod_base = OTHER; note = 5-methyl
  modified_base 18: mod_base = OTHER; note = 5-methyl
  source 1..18: mol_type = other RNA
ggtaagttctgtccaagc

SEQ ID NO: 10876 - RNA, 18 nt, synthetic construct
  misc_feature 1..18: note = Description of Artificial Sequence: Synthetic Antisense oligonucleotide
  modified_base 6: mod_base = OTHER; note = bicyclic nucleic acid (BNA)
  modified_base 13: mod_base = OTHER; note = bicyclic nucleic acid (BNA)
  modified_base 9: mod_base = OTHER; note = 5-methyl
  modified_base 13..14: mod_base = OTHER; note = 5-methyl
  modified_base 18: mod_base = OTHER; note = 5-methyl
  source 1..18: mol_type = other RNA
ggtaagttctgtccaagc

SEQ ID NO: 10877 - RNA, 18 nt, synthetic construct
  misc_feature 1..18: note = Description of Artificial Sequence: Synthetic Antisense oligonucleotide
  modified_base 9: mod_base = OTHER; note = 5-methyl
  modified_base 13..14: mod_base = OTHER; note = 5-methyl
  modified_base 18: mod_base = OTHER; note = 5-methyl
  modified_base 9: mod_base = OTHER; note = bicyclic nucleic acid (BNA)
  modified_base 11: mod_base = OTHER; note = bicyclic nucleic acid (BNA)
  source 1..18: mol_type = other RNA
ggtaagttctgtccaagc

SEQ ID NO: 10878 - RNA, 18 nt, synthetic construct
  misc_feature 1..18: note = Description of Artificial Sequence: Synthetic Antisense oligonucleotide
  modified_base 9: mod_base = OTHER; note = 5-methyl
  modified_base 13..14: mod_base = OTHER; note = 5-methyl
  modified_base 18: mod_base = OTHER; note = 5-methyl
  modified_base 14: mod_base = OTHER; note = bicyclic nucleic acid (BNA)
  modified_base 17: mod_base = OTHER; note = bicyclic nucleic acid (BNA)
  source 1..18: mol_type = other RNA
ggtaagttctgtccaagc

SEQ ID NO: 10879 - RNA, 18 nt, synthetic construct
  misc_feature 1..18: note = Description of Artificial Sequence: Synthetic Antisense oligonucleotide
  modified_base 9: mod_base = OTHER; note = 5-methyl
  modified_base 13..14: mod_base = OTHER; note = 5-methyl
  modified_base 18: mod_base = OTHER; note = 5-methyl
  modified_base 11: mod_base = OTHER; note = bicyclic nucleic acid (BNA)
  modified_base 13: mod_base = OTHER; note = bicyclic nucleic acid (BNA)
  source 1..18: mol_type = other RNA
ggtaagttctgtccaagc

SEQ ID NO: 10880 - RNA, 18 nt, synthetic construct
  misc_feature 1..18: note = Description of Artificial Sequence: Synthetic Antisense oligonucleotide
  modified_base 2: mod_base = OTHER; note = bicyclic nucleic acid (BNA)
  modified_base 6: mod_base = OTHER; note = bicyclic nucleic acid (BNA)
  modified_base 9: mod_base = OTHER; note = 5-methyl
  modified_base 13..14: mod_base = OTHER; note = 5-methyl
  modified_base 18: mod_base = OTHER; note = 5-methyl
  source 1..18: mol_type = other RNA
ggtaagttctgtccaagc

SEQ ID NO: 10881 - RNA, 18 nt, synthetic construct
  misc_feature 1..18: note = Description of Artificial Sequence: Synthetic Antisense oligonucleotide
  modified_base 2: mod_base = OTHER; note = bicyclic nucleic acid (BNA)
  modified_base 11: mod_base = OTHER; note = bicyclic nucleic acid (BNA)
  modified_base 9: mod_base = OTHER; note = 5-methyl
  modified_base 13..14: mod_base = OTHER; note = 5-methyl
  modified_base 18: mod_base = OTHER; note = 5-methyl
  source 1..18: mol_type = other RNA
ggtaagttctgtccaagc

SEQ ID NO: 10882 - RNA, 18 nt, synthetic construct
  misc_feature 1..18: note = Description of Artificial Sequence: Synthetic Antisense oligonucleotide
  modified_base 9: mod_base = OTHER; note = 5-methyl
  modified_base 13..14: mod_base = OTHER; note = 5-methyl
  modified_base 18: mod_base = OTHER; note = 5-methyl
  modified_base 9: mod_base = OTHER; note = bicyclic nucleic acid (BNA)
  modified_base 17: mod_base = OTHER; note = bicyclic nucleic acid (BNA)
  source 1..18: mol_type = other RNA
ggtaagttctgtccaagc

SEQ ID NO: 10883 - RNA, 18 nt, synthetic construct
  misc_feature 1..18: note = Description of Artificial Sequence: Synthetic Antisense oligonucleotide
  modified_base 2: mod_base = OTHER; note = bicyclic nucleic acid (BNA)
  modified_base 14: mod_base = OTHER; note = bicyclic nucleic acid (BNA)
  modified_base 9: mod_base = OTHER; note = 5-methyl
  modified_base 13..14: mod_base = OTHER; note = 5-methyl
  modified_base 18: mod_base = OTHER; note = 5-methyl
  source 1..18: mol_type = other RNA
ggtaagttctgtccaagc

SEQ ID NO: 10884 - RNA, 18 nt, synthetic construct
  misc_feature 1..18: note = Description of Artificial Sequence: Synthetic Antisense oligonucleotide
  modified_base 9: mod_base = OTHER; note = 5-methyl
  modified_base 13..14: mod_base = OTHER; note = 5-methyl
  modified_base 18: mod_base = OTHER; note = 5-methyl
  modified_base 11: mod_base = OTHER; note = bicyclic nucleic acid (BNA)
  modified_base 14: mod_base = OTHER; note = bicyclic nucleic acid (BNA)
  source 1..18: mol_type = other RNA
ggtaagttctgtccaagc

SEQ ID NO: 10885 - RNA, 18 nt, synthetic construct
  misc_feature 1..18: note = Description of Artificial Sequence: Synthetic Antisense oligonucleotide
  modified_base 6: mod_base = OTHER; note = bicyclic nucleic acid (BNA)
  modified_base 11: mod_base = OTHER; note = bicyclic nucleic acid (BNA)
  modified_base 9: mod_base = OTHER; note = 5-methyl
  modified_base 13..14: mod_base = OTHER; note = 5-methyl
  modified_base 18: mod_base = OTHER; note = 5-methyl
  source 1..18: mol_type = other RNA
ggtaagttctgtccaagc

SEQ ID NO: 10886 - RNA, 18 nt, synthetic construct
  misc_feature 1..18: note = Description of Artificial Sequence: Synthetic Antisense oligonucleotide
  modified_base 2: mod_base = OTHER; note = bicyclic nucleic acid (BNA)
  modified_base 13: mod_base = OTHER; note = bicyclic nucleic acid (BNA)
  modified_base 9: mod_base = OTHER; note = 5-methyl
  modified_base 13..14: mod_base = OTHER; note = 5-methyl
  modified_base 18: mod_base = OTHER; note = 5-methyl
  source 1..18: mol_type = other RNA
ggtaagttctgtccaagc

SEQ ID NO: 10887 - RNA, 18 nt, synthetic construct
  misc_feature 1..18: note = Description of Artificial Sequence: Synthetic Antisense oligonucleotide
  modified_base 9: mod_base = OTHER; note = 5-methyl
  modified_base 13..14: mod_base = OTHER; note = 5-methyl
  modified_base 18: mod_base = OTHER; note = 5-methyl
  modified_base 9: mod_base = OTHER; note = bicyclic nucleic acid (BNA)
  modified_base 13: mod_base = OTHER; note = bicyclic nucleic acid (BNA)
  source 1..18: mol_type = other RNA
ggtaagttctgtccaagc

SEQ ID NO: 10888 - RNA, 18 nt, synthetic construct
  misc_feature 1..18: note = Description of Artificial Sequence: Synthetic Antisense oligonucleotide
  modified_base 6: mod_base = OTHER; note = bicyclic nucleic acid (BNA)
  modified_base 17: mod_base = OTHER; note = bicyclic nucleic acid (BNA)
  modified_base 9: mod_base = OTHER; note = 5-methyl
  modified_base 13..14: mod_base = OTHER; note = 5-methyl
  modified_base 18: mod_base = OTHER; note = 5-methyl
  source 1..18: mol_type = other RNA
ggtaagttctgtccaagc

SEQ ID NO: 10889 - RNA, 18 nt, synthetic construct
  misc_feature 1..18: note = Description of Artificial Sequence: Synthetic Antisense oligonucleotide
  modified_base 9: mod_base = OTHER; note = 5-methyl
  modified_base 13..14: mod_base = OTHER; note = 5-methyl
  modified_base 18: mod_base = OTHER; note = 5-methyl
  modified_base 11: mod_base = OTHER; note = bicyclic nucleic acid (BNA)
  modified_base 17: mod_base = OTHER; note = bicyclic nucleic acid (BNA)
  source 1..18: mol_type = other RNA
ggtaagttctgtccaagc

SEQ ID NO: 10890 - RNA, 18 nt, synthetic construct
  misc_feature 1..18: note = Description of Artificial Sequence: Synthetic Antisense oligonucleotide
  modified_base 2: mod_base = OTHER; note = bicyclic nucleic acid (BNA)
  modified_base 9: mod_base = OTHER; note = bicyclic nucleic acid (BNA)
  modified_base 9: mod_base = OTHER; note = 5-methyl
  modified_base 13..14: mod_base = OTHER; note = 5-methyl
  modified_base 18: mod_base = OTHER; note = 5-methyl
  source 1..18: mol_type = other RNA
ggtaagttctgtccaagc

SEQ ID NO: 10891 - RNA, 18 nt, synthetic construct
  misc_feature 1..18: note = Description of Artificial Sequence: Synthetic Antisense oligonucleotide
  modified_base 8: mod_base = OTHER; note = 5-methyl
  modified_base 12..13: mod_base = OTHER; note = 5-methyl
  modified_base 17..18: mod_base = OTHER; note = 5-methyl
  modified_base 12: mod_base = OTHER; note = bicyclic nucleic acid (BNA)
  modified_base 17: mod_base = OTHER; note = bicyclic nucleic acid (BNA)
  source 1..18: mol_type = other RNA
gtaagttctgtccaagcc

SEQ ID NO: 10892 - RNA, 18 nt, synthetic construct
  misc_feature 1..18: note = Description of Artificial Sequence: Synthetic Antisense oligonucleotide
  modified_base 5: mod_base = OTHER; note = bicyclic nucleic acid (BNA)
  modified_base 8: mod_base = OTHER; note = bicyclic nucleic acid (BNA)
  modified_base 8: mod_base = OTHER; note = 5-methyl
  modified_base 12..13: mod_base = OTHER; note = 5-methyl
  modified_base 17..18: mod_base = OTHER; note = 5-methyl
  source 1..18: mol_type = other RNA
gtaagttctgtccaagcc

SEQ ID NO: 10893 - RNA, 18 nt, synthetic construct
  misc_feature 1..18: note = Description of Artificial Sequence: Synthetic Antisense oligonucleotide
  modified_base 8: mod_base = OTHER; note = 5-methyl
  modified_base 12..13: mod_base = OTHER; note = 5-methyl
  modified_base 17..18: mod_base = OTHER; note = 5-methyl
  modified_base 8: mod_base = OTHER; note = bicyclic nucleic acid (BNA)
  modified_base 13: mod_base = OTHER; note = bicyclic nucleic acid (BNA)
  source 1..18: mol_type = other RNA
gtaagttctgtccaagcc

SEQ ID NO: 10894 - RNA, 18 nt, synthetic construct
  misc_feature 1..18: note = Description of Artificial Sequence: Synthetic Antisense oligonucleotide
  modified_base 5: mod_base = OTHER; note = bicyclic nucleic acid (BNA)
  modified_base 13: mod_base = OTHER; note = bicyclic nucleic acid (BNA)
  modified_base 8: mod_base = OTHER; note = 5-methyl
  modified_base 12..13: mod_base = OTHER; note = 5-methyl
  modified_base 17..18: mod_base = OTHER; note = 5-methyl
  source 1..18: mol_type = other RNA
gtaagttctgtccaagcc

SEQ ID NO: 10895 - RNA, 18 nt, synthetic construct
  misc_feature 1..18: note = Description of Artificial Sequence: Synthetic Antisense oligonucleotide
  modified_base 8: mod_base = OTHER; note = 5-methyl
  modified_base 12..13: mod_base = OTHER; note = 5-methyl
  modified_base 17..18: mod_base = OTHER; note = 5-methyl
  modified_base 8: mod_base = OTHER; note = bicyclic nucleic acid (BNA)
  modified_base 17: mod_base = OTHER; note = bicyclic nucleic acid (BNA)
  source 1..18: mol_type = other RNA
gtaagttctgtccaagcc

SEQ ID NO: 10896 - RNA, 18 nt, synthetic construct
  misc_feature 1..18: note = Description of Artificial Sequence: Synthetic Antisense oligonucleotide
  modified_base 8: mod_base = OTHER; note = 5-methyl
  modified_base 12..13: mod_base = OTHER; note = 5-methyl
  modified_base 17..18: mod_base = OTHER; note = 5-methyl
  modified_base 13: mod_base = OTHER; note = bicyclic nucleic acid (BNA)
  modified_base 17: mod_base = OTHER; note = bicyclic nucleic acid (BNA)
  source 1..18: mol_type = other RNA
gtaagttctgtccaagcc

SEQ ID NO: 10897 - RNA, 18 nt, synthetic construct
  misc_feature 1..18: note = Description of Artificial Sequence: Synthetic Antisense oligonucleotide
  modified_base 8: mod_base = OTHER; note = 5-methyl
  modified_base 12..13: mod_base = OTHER; note = 5-methyl
  modified_base 17..18: mod_base = OTHER; note = 5-methyl
  modified_base 8: mod_base = OTHER; note = bicyclic nucleic acid (BNA)
  modified_base 12: mod_base = OTHER; note = bicyclic nucleic acid (BNA)
  source 1..18: mol_type = other RNA
gtaagttctgtccaagcc

SEQ ID NO: 10898 - RNA, 18 nt, synthetic construct
  misc_feature 1..18: note = Description of Artificial Sequence: Synthetic Antisense oligonucleotide
  modified_base 5: mod_base = OTHER; note = bicyclic nucleic acid (BNA)
  modified_base 10: mod_base = OTHER; note = bicyclic nucleic acid (BNA)
  modified_base 8: mod_base = OTHER; note = 5-methyl
  modified_base 12..13: mod_base = OTHER; note = 5-methyl
  modified_base 17..18: mod_base = OTHER; note = 5-methyl
  source 1..18: mol_type = other RNA
gtaagttctgtccaagcc

SEQ ID NO: 10899 - RNA, 18 nt, synthetic construct
  misc_feature 1..18: note = Description of Artificial Sequence: Synthetic Antisense oligonucleotide
  modified_base 8: mod_base = OTHER; note = 5-methyl
  modified_base 12..13: mod_base = OTHER; note = 5-methyl
  modified_base 17..18: mod_base = OTHER; note = 5-methyl
  modified_base 8: mod_base = OTHER; note = bicyclic nucleic acid (BNA)
  modified_base 16: mod_base = OTHER; note = bicyclic nucleic acid (BNA)
  source 1..18: mol_type = other RNA
gtaagttctgtccaagcc

SEQ ID NO: 10900 - RNA, 18 nt, synthetic construct
  misc_feature 1..18: note = Description of Artificial Sequence: Synthetic Antisense oligonucleotide
  modified_base 8: mod_base = OTHER; note = 5-methyl
  modified_base 12..13: mod_base = OTHER; note = 5-methyl
  modified_base 17..18: mod_base = OTHER; note = 5-methyl
  modified_base 10: mod_base = OTHER; note = bicyclic nucleic acid (BNA)
  modified_base 16: mod_base = OTHER; note = bicyclic nucleic acid (BNA)
  source 1..18: mol_type = other RNA
gtaagttctgtccaagcc

SEQ ID NO: 10901 - RNA, 18 nt, synthetic construct
  misc_feature 1..18: note = Description of Artificial Sequence: Synthetic Antisense oligonucleotide
  modified_base 8: mod_base = OTHER; note = 5-methyl
  modified_base 12..13: mod_base = OTHER; note = 5-methyl
  modified_base 17..18: mod_base = OTHER; note = 5-methyl
  modified_base 10: mod_base = OTHER; note = bicyclic nucleic acid (BNA)
  modified_base 12: mod_base = OTHER; note = bicyclic nucleic acid (BNA)
  source 1..18: mol_type = other RNA
gtaagttctgtccaagcc

SEQ ID NO: 10902 - RNA, 18 nt, synthetic construct
  misc_feature 1..18: note = Description of Artificial Sequence: Synthetic Antisense oligonucleotide
  modified_base 5: mod_base = OTHER; note = bicyclic nucleic acid (BNA)
  modified_base 17: mod_base = OTHER; note = bicyclic nucleic acid (BNA)
  modified_base 8: mod_base = OTHER; note = 5-methyl
  modified_base 12..13: mod_base = OTHER; note = 5-methyl
  modified_base 17..18: mod_base = OTHER; note = 5-methyl
  source 1..18: mol_type = other RNA
gtaagttctgtccaagcc

SEQ ID NO: 10903 - RNA, 18 nt, synthetic construct
  misc_feature 1..18: note = Description of Artificial Sequence: Synthetic Antisense oligonucleotide
  modified_base 8: mod_base = OTHER; note = 5-methyl
  modified_base 12..13: mod_base = OTHER; note = 5-methyl
  modified_base 17..18: mod_base = OTHER; note = 5-methyl
  modified_base 10: mod_base = OTHER; note = bicyclic nucleic acid (BNA)
  modified_base 17: mod_base = OTHER; note = bicyclic nucleic acid (BNA)
  source 1..18: mol_type = other RNA
gtaagttctgtccaagcc

SEQ ID NO: 10904 - RNA, 18 nt, synthetic construct
  misc_feature 1..18: note = Description of Artificial Sequence: Synthetic Antisense oligonucleotide
  modified_base 8: mod_base = OTHER; note = 5-methyl
  modified_base 12..13: mod_base = OTHER; note = 5-methyl
  modified_base 17..18: mod_base = OTHER; note = 5-methyl
  modified_base 12..13: mod_base = OTHER; note = bicyclic nucleic acid (BNA)
  source 1..18: mol_type = other RNA
gtaagttctgtccaagcc

SEQ ID NO: 10905 - RNA, 18 nt, synthetic construct
  misc_feature 1..18: note = Description of Artificial Sequence: Synthetic Antisense oligonucleotide
  modified_base 5: mod_base = OTHER; note = bicyclic nucleic acid (BNA)
  modified_base 12: mod_base = OTHER; note = bicyclic nucleic acid (BNA)
  modified_base 8: mod_base = OTHER; note = 5-methyl
  modified_base 12..13: mod_base = OTHER; note = 5-methyl
  modified_base 17..18: mod_base = OTHER; note = 5-methyl
  source 1..18: mol_type = other RNA
gtaagttctgtccaagcc

SEQ ID NO: 10906 - RNA, 18 nt, synthetic construct
  misc_feature 1..18: note = Description of Artificial Sequence: Synthetic Antisense oligonucleotide
  modified_base 8: mod_base = OTHER; note = 5-methyl
  modified_base 12..13: mod_base = OTHER; note = 5-methyl
  modified_base 17..18: mod_base = OTHER; note = 5-methyl
  modified_base 8: mod_base = OTHER; note = bicyclic nucleic acid (BNA)
  modified_base 10: mod_base = OTHER; note = bicyclic nucleic acid (BNA)
  source 1..18: mol_type = other RNA
gtaagttctgtccaagcc

SEQ ID NO: 10907 - RNA, 18 nt, synthetic construct
  misc_feature 1..18: note = Description of Artificial Sequence: Synthetic Antisense oligonucleotide
  modified_base 8: mod_base = OTHER; note = 5-methyl
  modified_base 12..13: mod_base = OTHER; note = 5-methyl
  modified_base 17..18: mod_base = OTHER; note = 5-methyl
  modified_base 13: mod_base = OTHER; note = bicyclic nucleic acid (BNA)
  modified_base 16: mod_base = OTHER; note = bicyclic nucleic acid (BNA)
  source 1..18: mol_type = other RNA
gtaagttctgtccaagcc

SEQ ID NO: 10908 - RNA, 18 nt, synthetic construct
  misc_feature 1..18: note = Description of Artificial Sequence: Synthetic Antisense oligonucleotide
  modified_base 5: mod_base = OTHER; note = bicyclic nucleic acid (BNA)
  modified_base 16: mod_base = OTHER; note = bicyclic nucleic acid (BNA)
  modified_base 8: mod_base = OTHER; note = 5-methyl
  modified_base 12..13: mod_base = OTHER; note = 5-methyl
  modified_base 17..18: mod_base = OTHER; note = 5-methyl
  source 1..18: mol_type = other RNA
gtaagttctgtccaagcc

SEQ ID NO: 10909 - RNA, 18 nt, synthetic construct
  misc_feature 1..18: note = Description of Artificial Sequence: Synthetic Antisense oligonucleotide
  modified_base 8: mod_base = OTHER; note = 5-methyl
  modified_base 12..13: mod_base = OTHER; note = 5-methyl
  modified_base 17..18: mod_base = OTHER; note = 5-methyl
  modified_base 12: mod_base = OTHER; note = bicyclic nucleic acid (BNA)
  modified_base 16: mod_base = OTHER; note = bicyclic nucleic acid (BNA)
  source 1..18: mol_type = other RNA
gtaagttctgtccaagcc

SEQ ID NO: 10910 - RNA, 18 nt, synthetic construct
  misc_feature 1..18: note = Description of Artificial Sequence: Synthetic Antisense oligonucleotide
  modified_base 8: mod_base = OTHER; note = 5-methyl
  modified_base 12..13: mod_base = OTHER; note = 5-methyl
  modified_base 17..18: mod_base = OTHER; note = 5-methyl
  modified_base 16..17: mod_base = OTHER; note = bicyclic nucleic acid (BNA)
  source 1..18: mol_type = other RNA
gtaagttctgtccaagcc

SEQ ID NO: 10911 - RNA, 18 nt, synthetic construct
  misc_feature 1..18: note = Description of Artificial Sequence: Synthetic Antisense oligonucleotide
  modified_base 8: mod_base = OTHER; note = 5-methyl
  modified_base 12..13: mod_base = OTHER; note = 5-methyl
  modified_base 17..18: mod_base = OTHER; note = 5-methyl
  modified_base 10: mod_base = OTHER; note = bicyclic nucleic acid (BNA)
  modified_base 13: mod_base = OTHER; note = bicyclic nucleic acid (BNA)
  source 1..18: mol_type = other RNA
gtaagttctgtccaagcc

SEQ ID NO: 10912 - RNA, 18 nt, synthetic construct
  misc_feature 1..18: note = Description of Artificial Sequence: Synthetic Antisense oligonucleotide
  modified_base 4: mod_base = OTHER; note = 5-methyl
  modified_base 13: mod_base = OTHER; note = 5-methyl
  modified_base 17..18: mod_base = OTHER; note = 5-methyl
  modified_base 6: mod_base = OTHER; note = bicyclic nucleic acid (BNA)
  modified_base 10: mod_base = OTHER; note = bicyclic nucleic acid (BNA)
  source 1..18: mol_type = other RNA
agtcggtaagttctgtcc

SEQ ID NO: 10913 - RNA, 18 nt, synthetic construct
  misc_feature 1..18: note = Description of Artificial Sequence: Synthetic Antisense oligonucleotide
  modified_base 2: mod_base = OTHER; note = bicyclic nucleic acid (BNA)
  modified_base 4: mod_base = OTHER; note = bicyclic nucleic acid (BNA)
  modified_base 4: mod_base = OTHER; note = 5-methyl
  modified_base 13: mod_base = OTHER; note = 5-methyl
  modified_base 17..18: mod_base = OTHER; note = 5-methyl
  source 1..18: mol_type = other RNA
agtcggtaagttctgtcc

SEQ ID NO: 10914 - RNA, 18 nt, synthetic construct
  misc_feature 1..18: note = Description of Artificial Sequence: Synthetic Antisense oligonucleotide
  modified_base 4: mod_base = OTHER; note = 5-methyl
  modified_base 13: mod_base = OTHER; note = 5-methyl
  modified_base 17..18: mod_base = OTHER; note = 5-methyl
  modified_base 5: mod_base = OTHER; note = bicyclic nucleic acid (BNA)
  modified_base 13: mod_base = OTHER; note = bicyclic nucleic acid (BNA)
  source 1..18: mol_type = other RNA
agtcggtaagttctgtcc

SEQ ID NO: 10915 - RNA, 18 nt, synthetic construct
  misc_feature 1..18: note = Description of Artificial Sequence: Synthetic Antisense oligonucleotide
  modified_base 4: mod_base = OTHER; note = 5-methyl
  modified_base 13: mod_base = OTHER; note = 5-methyl
  modified_base 17..18: mod_base = OTHER; note = 5-methyl
  modified_base 13: mod_base = OTHER; note = bicyclic nucleic acid (BNA)
  modified_base 17: mod_base = OTHER; note = bicyclic nucleic acid (BNA)
  source 1..18: mol_type = other RNA
agtcggtaagttctgtcc

SEQ ID NO: 10916 - RNA, 18 nt, synthetic construct
  misc_feature 1..18: note = Description of Artificial Sequence: Synthetic Antisense oligonucleotide
  modified_base 4: mod_base = OTHER; note = 5-methyl
  modified_base 13: mod_base = OTHER; note = 5-methyl
  modified_base 17..18: mod_base = OTHER; note = 5-methyl
  modified_base 4: mod_base = OTHER; note = bicyclic nucleic acid (BNA)
  modified_base 15: mod_base = OTHER; note = bicyclic nucleic acid (BNA)
  source 1..18: mol_type = other RNA
agtcggtaagttctgtcc

SEQ ID NO: 10917 - RNA, 18 nt, synthetic construct
  misc_feature 1..18: note = Description of Artificial Sequence: Synthetic Antisense oligonucleotide
  modified_base 4: mod_base = OTHER; note = 5-methyl
  modified_base 13: mod_base = OTHER; note = 5-methyl
  modified_base 17..18: mod_base = OTHER; note = 5-methyl
  modified_base 5: mod_base = OTHER; note = bicyclic nucleic acid (BNA)
  modified_base 10: mod_base = OTHER; note = bicyclic nucleic acid (BNA)
  source 1..18: mol_type = other RNA
agtcggtaagttctgtcc

SEQ ID NO: 10918 - RNA, 18 nt, synthetic construct
  misc_feature 1..18: note = Description of Artificial Sequence: Synthetic Antisense oligonucleotide
  modified_base 2: mod_base = OTHER; note = bicyclic nucleic acid (BNA)
  modified_base 17: mod_base = OTHER; note = bicyclic nucleic acid (BNA)
  modified_base 4: mod_base = OTHER; note = 5-methyl
  modified_base 13: mod_base = OTHER; note = 5-methyl
  modified_base 17..18: mod_base = OTHER; note = 5-methyl
  source 1..18: mol_type = other RNA
agtcggtaagttctgtcc

SEQ ID NO: 10919 - RNA, 18 nt, synthetic construct
  misc_feature 1..18: note = Description of Artificial Sequence: Synthetic Antisense oligonucleotide
  modified_base 4: mod_base = OTHER; note = 5-methyl
  modified_base 13: mod_base = OTHER; note = 5-methyl
  modified_base 17..18: mod_base = OTHER; note = 5-methyl
  modified_base 6: mod_base = OTHER; note = bicyclic nucleic acid (BNA)
  modified_base 13: mod_base = OTHER; note = bicyclic nucleic acid (BNA)
  source 1..18: mol_type = other RNA
agtcggtaagttctgtcc

SEQ ID NO: 10920 - RNA, 18 nt, synthetic construct
  misc_feature 1..18: note = Description of Artificial Sequence: Synthetic Antisense oligonucleotide
  modified_base 2: mod_base = OTHER; note = bicyclic nucleic acid (BNA)
  modified_base 15: mod_base = OTHER; note = bicyclic nucleic acid (BNA)
  modified_base 4: mod_base = OTHER; note = 5-methyl
  modified_base 13: mod_base = OTHER; note = 5-methyl
  modified_base 17..18: mod_base = OTHER; note = 5-methyl
  source 1..18: mol_type = other RNA
agtcggtaagttctgtcc

SEQ ID NO: 10921 - RNA, 18 nt, synthetic construct
  misc_feature 1..18: note = Description of Artificial Sequence: Synthetic Antisense oligonucleotide
  modified_base 2: mod_base = OTHER; note = bicyclic nucleic acid (BNA)
  modified_base 6: mod_base = OTHER; note = bicyclic nucleic acid (BNA)
  modified_base 4: mod_base = OTHER; note = 5-methyl
  modified_base 13: mod_base = OTHER; note = 5-methyl
  modified_base 17..18: mod_base = OTHER; note = 5-methyl
  source 1..18: mol_type = other RNA
agtcggtaagttctgtcc

SEQ ID NO: 10922 - RNA, 18 nt, synthetic construct
  misc_feature 1..18: note = Description of Artificial Sequence: Synthetic Antisense oligonucleotide
  modified_base 4: mod_base = OTHER; note = 5-methyl
  modified_base 13: mod_base = OTHER; note = 5-methyl
  modified_base 17..18: mod_base = OTHER; note = 5-methyl
  modified_base 4: mod_base = OTHER; note = bicyclic nucleic acid (BNA)
  modified_base 17: mod_base = OTHER; note = bicyclic nucleic acid (BNA)
  source 1..18: mol_type = other RNA
agtcggtaagttctgtcc

SEQ ID NO: 10923 - RNA, 18 nt, synthetic construct
  misc_feature 1..18: note = Description of Artificial Sequence: Synthetic Antisense oligonucleotide
  modified_base 4: mod_base = OTHER; note = 5-methyl
  modified_base 13: mod_base = OTHER; note = 5-methyl
  modified_base 17..18: mod_base = OTHER; note = 5-methyl
  modified_base 10: mod_base = OTHER; note = bicyclic nucleic acid (BNA)
  modified_base 15: mod_base = OTHER; note = bicyclic nucleic acid (BNA)
  source 1..18: mol_type = other RNA
agtcggtaagttctgtcc

SEQ ID NO: 10924 - RNA, 18 nt, synthetic construct
  misc_feature 1..18: note = Description of Artificial Sequence: Synthetic Antisense oligonucleotide
  modified_base 4: mod_base = OTHER; note = 5-methyl
  modified_base 13: mod_base = OTHER; note = 5-methyl
  modified_base 17..18: mod_base = OTHER; note = 5-methyl
  modified_base 13: mod_base = OTHER; note = bicyclic nucleic acid (BNA)
  modified_base 15: mod_base = OTHER; note = bicyclic nucleic acid (BNA)
  source 1..18: mol_type = other RNA
agtcggtaagttctgtcc

SEQ ID NO: 10925 - RNA, 18 nt, synthetic construct
  misc_feature 1..18: note = Description of Artificial Sequence: Synthetic Antisense oligonucleotide
  modified_base 4: mod_base = OTHER; note = 5-methyl
  modified_base 13: mod_base = OTHER; note = 5-methyl
  modified_base 17..18: mod_base = OTHER; note = 5-methyl
  modified_base 5..6: mod_base = OTHER; note = bicyclic nucleic acid (BNA)
  source 1..18: mol_type = other RNA
agtcggtaagttctgtcc

SEQ ID NO: 10926 - RNA, 18 nt, synthetic construct
  misc_feature 1..18: note = Description of Artificial Sequence: Synthetic Antisense oligonucleotide
  modified_base 4: mod_base = OTHER; note = 5-methyl
  modified_base 13: mod_base = OTHER; note = 5-methyl
  modified_base 17..18: mod_base = OTHER; note = 5-methyl
  modified_base 5: mod_base = OTHER; note = bicyclic nucleic acid (BNA)
  modified_base 15: mod_base = OTHER; note = bicyclic nucleic acid (BNA)
  source 1..18: mol_type = other RNA
agtcggtaagttctgtcc

SEQ ID NO: 10927 - RNA, 18 nt, synthetic construct
  misc_feature 1..18: note = Description of Artificial Sequence: Synthetic Antisense oligonucleotide
  modified_base 2: mod_base = OTHER; note = bicyclic nucleic acid (BNA)
  modified_base 5: mod_base = OTHER; note = bicyclic nucleic acid (BNA)
  modified_base 4: mod_base = OTHER; note = 5-methyl
  modified_base 13: mod_base = OTHER; note = 5-methyl
  modified_base 17..18: mod_base = OTHER; note = 5-methyl
  source 1..18: mol_type = other RNA
agtcggtaagttctgtcc

SEQ ID NO: 10928 - RNA, 18 nt, synthetic construct
  misc_feature 1..18: note = Description of Artificial Sequence: Synthetic Antisense oligonucleotide
  modified_base 4: mod_base = OTHER; note = 5-methyl
  modified_base 13: mod_base = OTHER; note = 5-methyl
  modified_base 17..18: mod_base = OTHER; note = 5-methyl
  modified_base 5: mod_base = OTHER; note = bicyclic nucleic acid (BNA)
  modified_base 17: mod_base = OTHER; note = bicyclic nucleic acid (BNA)
  source 1..18: mol_type = other RNA
agtcggtaagttctgtcc

SEQ ID NO: 10929 - RNA, 18 nt, synthetic construct
  misc_feature 1..18: note = Description of Artificial Sequence: Synthetic Antisense oligonucleotide
  modified_base 4: mod_base = OTHER; note = 5-methyl
  modified_base 13: mod_base = OTHER; note = 5-methyl
  modified_base 17..18: mod_base = OTHER; note = 5-methyl
  modified_base 10: mod_base = OTHER; note = bicyclic nucleic acid (BNA)
  modified_base 17: mod_base = OTHER; note = bicyclic nucleic acid (BNA)
  source 1..18: mol_type = other RNA
agtcggtaagttctgtcc

SEQ ID NO: 10930 - RNA, 18 nt, synthetic construct
  misc_feature 1..18: note = Description of Artificial Sequence: Synthetic Antisense oligonucleotide
  modified_base 4: mod_base = OTHER; note = 5-methyl
  modified_base 13: mod_base = OTHER; note = 5-methyl
  modified_base 17..18: mod_base = OTHER; note = 5-methyl
  modified_base 4: mod_base = OTHER; note = bicyclic nucleic acid (BNA)
  modified_base 10: mod_base = OTHER; note = bicyclic nucleic acid (BNA)
  source 1..18: mol_type = other RNA
agtcggtaagttctgtcc

SEQ ID NO: 10931 - RNA, 18 nt, synthetic construct
  misc_feature 1..18: note = Description of Artificial Sequence: Synthetic Antisense oligonucleotide
  modified_base 2: mod_base = OTHER; note = bicyclic nucleic acid (BNA)
  modified_base 10: mod_base = OTHER; note = bicyclic nucleic acid (BNA)
  modified_base 4: mod_base = OTHER; note = 5-methyl
  modified_base 13: mod_base = OTHER; note = 5-methyl
  modified_base 17..18: mod_base = OTHER; note = 5-methyl
  source 1..18: mol_type = other RNA
agtcggtaagttctgtcc

SEQ ID NO: 10932 - RNA, 18 nt, synthetic construct
  misc_feature 1..18: note = Description of Artificial Sequence: Synthetic Antisense oligonucleotide
  modified_base 4: mod_base = OTHER; note = 5-methyl
  modified_base 13: mod_base = OTHER; note = 5-methyl
  modified_base 17..18: mod_base = OTHER; note = 5-methyl
  modified_base 4: mod_base = OTHER; note = bicyclic nucleic acid (BNA)
  modified_base 6: mod_base = OTHER; note = bicyclic nucleic acid (BNA)
  source 1..18: mol_type = other RNA
agtcggtaagttctgtcc

SEQ ID NO: 10933 - RNA, 18 nt, synthetic construct
  misc_feature 1..18: note = Description of Artificial Sequence: Synthetic Antisense oligonucleotide
  modified_base 4: mod_base = OTHER; note = 5-methyl
  modified_base 13: mod_base = OTHER; note = 5-methyl
  modified_base 17..18: mod_base = OTHER; note = 5-methyl
  modified_base 4: mod_base = OTHER; note = bicyclic nucleic acid (BNA)
  modified_base 13: mod_base = OTHER; note = bicyclic nucleic acid (BNA)
  source 1..18: mol_type = other RNA
agtcggtaagttctgtcc

SEQ ID NO: 10934 - RNA, 18 nt, synthetic construct
  misc_feature 1..18: note = Description of Artificial Sequence: Synthetic Antisense oligonucleotide
  modified_base 4: mod_base = OTHER; note = 5-methyl
  modified_base 13: mod_base = OTHER; note = 5-methyl
  modified_base 17..18: mod_base = OTHER; note = 5-methyl
  modified_base 15: mod_base = OTHER; note = bicyclic nucleic acid (BNA)
  modified_base 17: mod_base = OTHER; note = bicyclic nucleic acid (BNA)
  source 1..18: mol_type = other RNA
agtcggtaagttctgtcc

SEQ ID NO: 10935 - RNA, 18 nt, synthetic construct
  misc_feature 1..18: note = Description of Artificial Sequence: Synthetic Antisense oligonucleotide
  modified_base 2: mod_base = OTHER; note = bicyclic nucleic acid (BNA)
  modified_base 13: mod_base = OTHER; note = bicyclic nucleic acid (BNA)
  modified_base 4: mod_base = OTHER; note = 5-methyl
  modified_base 13: mod_base = OTHER; note = 5-methyl
  modified_base 17..18: mod_base = OTHER; note = 5-methyl
  source 1..18: mol_type = other RNA
agtcggtaagttctgtcc

SEQ ID NO: 10936 - RNA, 18 nt, synthetic construct
  misc_feature 1..18: note = Description of Artificial Sequence: Synthetic Antisense oligonucleotide
  modified_base 4: mod_base = OTHER; note = 5-methyl
  modified_base 13: mod_base = OTHER; note = 5-methyl
  modified_base 17..18: mod_base = OTHER; note = 5-methyl
  modified_base 6: mod_base = OTHER; note = bicyclic nucleic acid (BNA)
  modified_base 17: mod_base = OTHER; note = bicyclic nucleic acid (BNA)
  source 1..18: mol_type = other RNA
agtcggtaagttctgtcc

SEQ ID NO: 10937 - RNA, 18 nt, synthetic construct
  misc_feature 1..18: note = Description of Artificial Sequence: Synthetic Antisense oligonucleotide
  modified_base 4: mod_base = OTHER; note = 5-methyl
  modified_base 13: mod_base = OTHER; note = 5-methyl
  modified_base 17..18: mod_base = OTHER; note = 5-methyl
  modified_base 6: mod_base = OTHER; note = bicyclic nucleic acid (BNA)
  modified_base 15: mod_base = OTHER; note = bicyclic nucleic acid (BNA)
  source 1..18: mol_type = other RNA
agtcggtaagttctgtcc

SEQ ID NO: 10938 - RNA, 18 nt, synthetic construct
  misc_feature 1..18: note = Description of Artificial Sequence: Synthetic Antisense oligonucleotide
  modified_base 4: mod_base = OTHER; note = 5-methyl
  modified_base 13: mod_base = OTHER; note = 5-methyl
  modified_base 17..18: mod_base = OTHER; note = 5-methyl
  modified_base 4..5: mod_base = OTHER; note = bicyclic nucleic acid (BNA)
  source 1..18: mol_type = other RNA
agtcggtaagttctgtcc

SEQ ID NO: 10939 - RNA, 18 nt, synthetic construct
  misc_feature 1..18: note = Description of Artificial Sequence: Synthetic Antisense oligonucleotide
  modified_base 4: mod_base = OTHER; note = 5-methyl
  modified_base 13: mod_base = OTHER; note = 5-methyl
  modified_base 17..18: mod_base = OTHER; note = 5-methyl
  modified_base 10: mod_base = OTHER; note = bicyclic nucleic acid (BNA)
  modified_base 13: mod_base = OTHER; note = bicyclic nucleic acid (BNA)
  source 1..18: mol_type = other RNA
agtcggtaagttctgtcc

SEQ ID NO: 10940 - RNA, 18 nt, synthetic construct
  misc_feature 1..18: note = Description of Artificial Sequence: Synthetic Antisense oligonucleotide
  modified_base 1: mod_base = OTHER; note = 5-methyl
  modified_base 5..6: mod_base = OTHER; note = 5-methyl
  modified_base 10..12: mod_base = OTHER; note = 5-methyl
  modified_base 12: mod_base = OTHER; note = bicyclic nucleic acid (BNA)
  modified_base 17: mod_base = OTHER; note = bicyclic nucleic acid (BNA)
  source 1..18: mol_type = other RNA
ctgtccaagcccggttga

SEQ ID NO: 10941 - RNA, 18 nt, synthetic construct
  misc_feature 1..18: note = Description of Artificial Sequence: Synthetic Antisense oligonucleotide
  modified_base 1: mod_base = OTHER; note = 5-methyl
  modified_base 5..6: mod_base = OTHER; note = 5-methyl
  modified_base 10..12: mod_base = OTHER; note = 5-methyl
  modified_base 6: mod_base = OTHER; note = bicyclic nucleic acid (BNA)
  modified_base 10: mod_base = OTHER; note = bicyclic nucleic acid (BNA)
  source 1..18: mol_type = other RNA
ctgtccaagcccggttga

SEQ ID NO: 10942 - RNA, 18 nt, synthetic construct
  misc_feature 1..18: note = Description of Artificial Sequence: Synthetic Antisense oligonucleotide
  modified_base 1: mod_base = OTHER; note = 5-methyl
  modified_base 5..6: mod_base = OTHER; note = 5-methyl
  modified_base 10..12: mod_base = OTHER; note = 5-methyl
  modified_base 9: mod_base = OTHER; note = bicyclic nucleic acid (BNA)
  modified_base 14: mod_base = OTHER; note = bicyclic nucleic acid (BNA)
  source 1..18: mol_type = other RNA
ctgtccaagcccggttga

SEQ ID NO: 10943 - RNA, 18 nt, synthetic construct
  misc_feature 1..18: note = Description of Artificial Sequence: Synthetic Antisense oligonucleotide
  modified_base 1: mod_base = OTHER; note = 5-methyl
  modified_base 5..6: mod_base = OTHER; note = 5-methyl
  modified_base 10..12: mod_base = OTHER; note = 5-methyl
  modified_base 11..12: mod_base = OTHER; note = bicyclic nucleic acid (BNA)
  source 1..18: mol_type = other RNA
ctgtccaagcccggttga

SEQ ID NO: 10944 - RNA, 18 nt, synthetic construct
  misc_feature 1..18: note = Description of Artificial Sequence: Synthetic Antisense oligonucleotide
  modified_base 1: mod_base = OTHER; note = 5-methyl
  modified_base 5..6: mod_base = OTHER; note = 5-methyl
  modified_base 10..12: mod_base = OTHER; note = 5-methyl
  modified_base 5: mod_base = OTHER; note = bicyclic nucleic acid (BNA)
  modified_base 9: mod_base = OTHER; note = bicyclic nucleic acid (BNA)
  source 1..18: mol_type = other RNA
ctgtccaagcccggttga

SEQ ID NO: 10945 - RNA, 18 nt, synthetic construct
  misc_feature 1..18: note = Description of Artificial Sequence: Synthetic Antisense oligonucleotide
  modified_base 1: mod_base = OTHER; note = 5-methyl
  modified_base 5..6: mod_base = OTHER; note = 5-methyl
  modified_base 10..12: mod_base = OTHER; note = 5-methyl
  modified_base 3: mod_base = OTHER; note = bicyclic nucleic acid (BNA)
  modified_base 9: mod_base = OTHER; note = bicyclic nucleic acid (BNA)
  source 1..18: mol_type = other RNA
ctgtccaagcccggttga

SEQ ID NO: 10946 - RNA, 18 nt, synthetic construct
  misc_feature 1..18: note = Description of Artificial Sequence: Synthetic Antisense oligonucleotide
  modified_base 1: mod_base = OTHER; note = 5-methyl
  modified_base 5..6: mod_base = OTHER; note = 5-methyl
  modified_base 10..12: mod_base = OTHER; note = 5-methyl
  modified_base 6: mod_base = OTHER; note = bicyclic nucleic acid (BNA)
  modified_base 14: mod_base = OTHER; note = bicyclic nucleic acid (BNA)
  source 1..18: mol_type = other RNA
ctgtccaagcccggttga

SEQ ID NO: 10947 - RNA, 18 nt, synthetic construct
  misc_feature 1..18: note = Description of Artificial Sequence: Synthetic Antisense oligonucleotide
  modified_base 1: mod_base = OTHER; note = 5-methyl
  modified_base 5..6: mod_base = OTHER; note = 5-methyl
  modified_base 10..12: mod_base = OTHER; note = 5-methyl
  modified_base 9..10: mod_base = OTHER; note = bicyclic nucleic acid (BNA)
  source 1..18: mol_type = other RNA
ctgtccaagcccggttga

SEQ ID NO: 10948 - RNA, 18 nt, synthetic construct
  misc_feature 1..18: note = Description of Artificial Sequence: Synthetic Antisense oligonucleotide
  modified_base 1: mod_base = OTHER; note = 5-methyl
  modified_base 5..6: mod_base = OTHER; note = 5-methyl
  modified_base 10..12: mod_base = OTHER; note = 5-methyl
  modified_base 5: mod_base = OTHER; note = bicyclic nucleic acid (BNA)
  modified_base 13: mod_base = OTHER; note = bicyclic nucleic acid (BNA)
  source 1..18: mol_type = other RNA
ctgtccaagcccggttga

SEQ ID NO: 10949 - RNA, 18 nt, synthetic construct
  misc_feature 1..18: note = Description of Artificial Sequence: Synthetic Antisense oligonucleotide
  modified_base 1: mod_base = OTHER; note = 5-methyl
  modified_base 5..6: mod_base = OTHER; note = 5-methyl
  modified_base 10..12: mod_base = OTHER; note = 5-methyl
  modified_base 3: mod_base = OTHER; note = bicyclic nucleic acid (BNA)
  modified_base 13: mod_base = OTHER; note = bicyclic nucleic acid (BNA)
  source 1..18: mol_type = other RNA
ctgtccaagcccggttga

SEQ ID NO: 10950 - RNA, 18 nt, synthetic construct
  misc_feature 1..18: note = Description of Artificial Sequence: Synthetic Antisense oligonucleotide
  modified_base 1: mod_base = OTHER; note = 5-methyl
  modified_base 5..6: mod_base = OTHER; note = 5-methyl
  modified_base 10..12: mod_base = OTHER; note = 5-methyl
  modified_base 13: mod_base = OTHER; note = bicyclic nucleic acid (BNA)
  modified_base 17: mod_base = OTHER; note = bicyclic nucleic acid (BNA)
  source 1..18: mol_type = other RNA
ctgtccaagcccggttga

SEQ ID NO: 10951 - RNA, 18 nt, synthetic construct
  misc_feature 1..18: note = Description of Artificial Sequence: Synthetic Antisense oligonucleotide
  modified_base 1: mod_base = OTHER; note = 5-methyl
  modified_base 5..6: mod_base = OTHER; note = 5-methyl
  modified_base 10..12: mod_base = OTHER; note = 5-methyl
  modified_base 3: mod_base = OTHER; note = bicyclic nucleic acid (BNA)
  modified_base 6: mod_base = OTHER; note = bicyclic nucleic acid (BNA)
  source 1..18: mol_type = other RNA
ctgtccaagcccggttga

SEQ ID NO: 10952 - RNA, 18 nt, synthetic construct
  misc_feature 1..18: note = Description of Artificial Sequence: Synthetic Antisense oligonucleotide
  modified_base 1: mod_base = OTHER; note = 5-methyl
  modified_base 5..6: mod_base = OTHER; note = 5-methyl
  modified_base 10..12: mod_base = OTHER; note = 5-methyl
  modified_base 6: mod_base = OTHER; note = bicyclic nucleic acid (BNA)
  modified_base 9: mod_base = OTHER; note = bicyclic nucleic acid (BNA)
  source 1..18: mol_type = other RNA
ctgtccaagcccggttga

SEQ ID NO: 10953 - RNA, 18 nt, synthetic construct
  misc_feature 1..18: note = Description of Artificial Sequence: Synthetic Antisense oligonucleotide
  modified_base 1: mod_base = OTHER; note = 5-methyl
  modified_base 5..6: mod_base = OTHER; note = 5-methyl
  modified_base 10..12: mod_base = OTHER; note = 5-methyl
  modified_base 5: mod_base = OTHER; note = bicyclic nucleic acid (BNA)
  modified_base 10: mod_base = OTHER; note = bicyclic nucleic acid (BNA)
  source 1..18: mol_type = other RNA
ctgtccaagcccggttga

SEQ ID NO: 10954 - RNA, 18 nt, synthetic construct
  misc_feature 1..18: note = Description of Artificial Sequence: Synthetic Antisense oligonucleotide
  modified_base 1: mod_base = OTHER; note = 5-methyl
  modified_base 5..6: mod_base = OTHER; note = 5-methyl
  modified_base 10..12: mod_base = OTHER; note = 5-methyl
  modified_base 3: mod_base = OTHER; note = bicyclic nucleic acid (BNA)
  modified_base 10: mod_base = OTHER; note = bicyclic nucleic acid (BNA)
  source 1..18: mol_type = other RNA
ctgtccaagcccggttga

SEQ ID NO: 10955 - RNA, 18 nt, synthetic construct
  misc_feature 1..18: note = Description of Artificial Sequence: Synthetic Antisense oligonucleotide
  modified_base 1: mod_base = OTHER; note = 5-methyl
  modified_base 5..6: mod_base = OTHER; note = 5-methyl
  modified_base 10..12: mod_base = OTHER; note = 5-methyl
  modified_base 13..14: mod_base = OTHER; note = bicyclic nucleic acid (BNA)
  source 1..18: mol_type = other RNA
ctgtccaagcccggttga

SEQ ID NO: 10956 - RNA, 18 nt, synthetic construct
  misc_feature 1..18: note = Description of Artificial Sequence: Synthetic Antisense oligonucleotide
  modified_base 1: mod_base = OTHER; note = 5-methyl
  modified_base 5..6: mod_base = OTHER; note = 5-methyl
  modified_base 10..12: mod_base = OTHER; note = 5-methyl
  modified_base 6: mod_base = OTHER; note = bicyclic nucleic acid (BNA)
  modified_base 13: mod_base = OTHER; note = bicyclic nucleic acid (BNA)
  source 1..18: mol_type = other RNA
ctgtccaagcccggttga

SEQ ID NO: 10957 - RNA, 18 nt, synthetic construct
  misc_feature 1..18: note = Description of Artificial Sequence: Synthetic Antisense oligonucleotide
  modified_base 1: mod_base = OTHER; note = 5-methyl
  modified_base 5..6: mod_base = OTHER; note = 5-methyl
  modified_base 10..12: mod_base = OTHER; note = 5-methyl
  modified_base 9: mod_base = OTHER; note = bicyclic nucleic acid (BNA)
  modified_base 11: mod_base = OTHER; note = bicyclic nucleic acid (BNA)
  source 1..18: mol_type = other RNA
ctgtccaagcccggttga

SEQ ID NO: 10958 - RNA, 18 nt, synthetic construct
  misc_feature 1..18: note = Description of Artificial Sequence: Synthetic Antisense oligonucleotide
  modified_base 1: mod_base = OTHER; note = 5-methyl
  modified_base 5..6: mod_base = OTHER; note = 5-methyl
  modified_base 10..12: mod_base = OTHER; note = 5-methyl
  modified_base 14: mod_base = OTHER; note = bicyclic nucleic acid (BNA)
  modified_base 17: mod_base = OTHER; note = bicyclic nucleic acid (BNA)
  source 1..18: mol_type = other RNA
ctgtccaagcccggttga

SEQ ID NO: 10959 - RNA, 18 nt, synthetic construct
  misc_feature 1..18: note = Description of Artificial Sequence: Synthetic Antisense oligonucleotide
  modified_base 1: mod_base = OTHER; note = 5-methyl
  modified_base 5..6: mod_base = OTHER; note = 5-methyl
  modified_base 10..12: mod_base = OTHER; note = 5-methyl
  modified_base 11: mod_base = OTHER; note = bicyclic nucleic acid (BNA)
  modified_base 13: mod_base = OTHER; note = bicyclic nucleic acid (BNA)
  source 1..18: mol_type = other RNA
ctgtccaagcccggttga

SEQ ID NO: 10960 - RNA, 18 nt, synthetic construct
  misc_feature 1..18: note = Description of Artificial Sequence: Synthetic Antisense oligonucleotide
  modified_base 1: mod_base = OTHER; note = 5-methyl
  modified_base 5..6: mod_base = OTHER; note = 5-methyl
  modified_base 10..12: mod_base = OTHER; note = 5-methyl
  modified_base 5: mod_base = OTHER; note = bicyclic nucleic acid (BNA)
  modified_base 14: mod_base = OTHER; note = bicyclic nucleic acid (BNA)
  source 1..18: mol_type = other RNA
ctgtccaagcccggttga

SEQ ID NO: 10961 - RNA, 18 nt, synthetic construct
  misc_feature 1..18: note = Description of Artificial Sequence: Synthetic Antisense oligonucleotide
  modified_base 1: mod_base = OTHER; note = 5-methyl
  modified_base 5..6: mod_base = OTHER; note = 5-methyl
  modified_base 10..12: mod_base = OTHER; note = 5-methyl
  modified_base 3: mod_base = OTHER; note = bicyclic nucleic acid (BNA)
  modified_base 14: mod_base = OTHER; note = bicyclic nucleic acid (BNA)
  source 1..18: mol_type = other RNA
ctgtccaagcccggttga

SEQ ID NO: 10962 - RNA, 18 nt, synthetic construct
  misc_feature 1..18: note = Description of Artificial Sequence: Synthetic Antisense oligonucleotide
  modified_base 1: mod_base = OTHER; note = 5-methyl
  modified_base 5..6: mod_base = OTHER; note = 5-methyl
  modified_base 10..12: mod_base = OTHER; note = 5-methyl
  modified_base 10: mod_base = OTHER; note = bicyclic nucleic acid (BNA)
  modified_base 12: mod_base = OTHER; note = bicyclic nucleic acid (BNA)
  source 1..18: mol_type = other RNA
ctgtccaagcccggttga

SEQ ID NO: 10963 - RNA, 18 nt, synthetic construct
  misc_feature 1..18: note = Description of Artificial Sequence: Synthetic Antisense oligonucleotide
  modified_base 1: mod_base = OTHER; note = 5-methyl
  modified_base 5..6: mod_base = OTHER; note = 5-methyl
  modified_base 10..12: mod_base = OTHER; note = 5-methyl
  modified_base 9: mod_base = OTHER; note = bicyclic nucleic acid (BNA)
  modified_base 17: mod_base = OTHER; note = bicyclic nucleic acid (BNA)
  source 1..18: mol_type = other RNA
ctgtccaagcccggttga

SEQ ID NO: 10964 - RNA, 18 nt, synthetic construct
  misc_feature 1..18: note = Description of Artificial Sequence: Synthetic Antisense oligonucleotide
  modified_base 1: mod_base = OTHER; note = 5-methyl
  modified_base 5..6: mod_base = OTHER; note = 5-methyl
  modified_base 10..12: mod_base = OTHER; note = 5-methyl
  modified_base 12: mod_base = OTHER; note = bicyclic nucleic acid (BNA)
  modified_base 14: mod_base = OTHER; note = bicyclic nucleic acid (BNA)
  source 1..18: mol_type = other RNA
ctgtccaagcccggttga

SEQ ID NO: 10965 - RNA, 18 nt, synthetic construct
  misc_feature 1..18: note = Description of Artificial Sequence: Synthetic Antisense oligonucleotide
  modified_base 1: mod_base = OTHER; note = 5-methyl
  modified_base 5..6: mod_base = OTHER; note = 5-methyl
  modified_base 10..12: mod_base = OTHER; note = 5-methyl
  modified_base 5: mod_base = OTHER; note = bicyclic nucleic acid (BNA)
  modified_base 11: mod_base = OTHER; note = bicyclic nucleic acid (BNA)
  source 1..18: mol_type = other RNA
ctgtccaagcccggttga

SEQ ID NO: 10966 - RNA, 18 nt, synthetic construct
  misc_feature 1..18: note = Description of Artificial Sequence: Synthetic Antisense oligonucleotide
  modified_base 1: mod_base = OTHER; note = 5-methyl
  modified_base 5..6: mod_base = OTHER; note = 5-methyl
  modified_base 10..12: mod_base = OTHER; note = 5-methyl
  modified_base 3: mod_base = OTHER; note = bicyclic nucleic acid (BNA)
  modified_base 17: mod_base = OTHER; note = bicyclic nucleic acid (BNA)
  source 1..18: mol_type = other RNA
ctgtccaagcccggttga

SEQ ID NO: 10967 - RNA, 18 nt, synthetic construct
  misc_feature 1..18: note = Description of Artificial Sequence: Synthetic Antisense oligonucleotide
  modified_base 1: mod_base = OTHER; note = 5-methyl
  modified_base 5..6: mod_base = OTHER; note = 5-methyl
  modified_base 10..12: mod_base = OTHER; note = 5-methyl
  modified_base 6: mod_base = OTHER; note = bicyclic nucleic acid (BNA)
  modified_base 12: mod_base = OTHER; note = bicyclic nucleic acid (BNA)
  source 1..18: mol_type = other RNA
ctgtccaagcccggttga

SEQ ID NO: 10968 - RNA, 18 nt, synthetic construct
  misc_feature 1..18: note = Description of Artificial Sequence: Synthetic Antisense oligonucleotide
  modified_base 1: mod_base = OTHER; note = 5-methyl
  modified_base 5..6: mod_base = OTHER; note = 5-methyl
  modified_base 10..12: mod_base = OTHER; note = 5-methyl
  modified_base 5..6: mod_base = OTHER; note = bicyclic nucleic acid (BNA)
  source 1..18: mol_type = other RNA
ctgtccaagcccggttga

SEQ ID NO: 10969 - RNA, 18 nt, synthetic construct
  misc_feature 1..18: note = Description of Artificial Sequence: Synthetic Antisense oligonucleotide
  modified_base 1: mod_base = OTHER; note = 5-methyl
  modified_base 5..6: mod_base = OTHER; note = 5-methyl
  modified_base 10..12: mod_base = OTHER; note = 5-methyl
  modified_base 11: mod_base = OTHER; note = bicyclic nucleic acid (BNA)
  modified_base 14: mod_base = OTHER; note = bicyclic nucleic acid (BNA)
  source 1..18: mol_type = other RNA
ctgtccaagcccggttga

SEQ ID NO: 10970 - RNA, 18 nt, synthetic construct
  misc_feature 1..18: note = Description of Artificial Sequence: Synthetic Antisense oligonucleotide
  modified_base 1: mod_base = OTHER; note = 5-methyl
  modified_base 5..6: mod_base = OTHER; note = 5-methyl
  modified_base 10..12: mod_base = OTHER; note = 5-methyl
  modified_base 9: mod_base = OTHER; note = bicyclic nucleic acid (BNA)
  modified_base 12: mod_base = OTHER; note = bicyclic nucleic acid (BNA)
  source 1..18: mol_type = other RNA
ctgtccaagcccggttga

SEQ ID NO: 10971 - RNA, 18 nt, synthetic construct
  misc_feature 1..18: note = Description of Artificial Sequence: Synthetic Antisense oligonucleotide
  modified_base 1: mod_base = OTHER; note = 5-methyl
  modified_base 5..6: mod_base = OTHER; note = 5-methyl
  modified_base 10..12: mod_base = OTHER; note = 5-methyl
  modified_base 5: mod_base = OTHER; note = bicyclic nucleic acid (BNA)
  modified_base 17: mod_base = OTHER; note = bicyclic nucleic acid (BNA)
  source 1..18: mol_type = other RNA
ctgtccaagcccggttga

SEQ ID NO: 10972 - RNA, 18 nt, synthetic construct
  misc_feature 1..18: note = Description of Artificial Sequence: Synthetic Antisense oligonucleotide
  modified_base 1: mod_base = OTHER; note = 5-methyl
  modified_base 5..6: mod_base = OTHER; note = 5-methyl
  modified_base 10..12: mod_base = OTHER; note = 5-methyl
  modified_base 3: mod_base = OTHER; note = bicyclic nucleic acid (BNA)
  modified_base 11: mod_base = OTHER; note = bicyclic nucleic acid (BNA)
  source 1..18: mol_type = other RNA
ctgtccaagcccggttga

SEQ ID NO: 10973 - RNA, 18 nt, synthetic construct
  misc_feature 1..18: note = Description of Artificial Sequence: Synthetic Antisense oligonucleotide
  modified_base 1: mod_base = OTHER; note = 5-methyl
  modified_base 5..6: mod_base = OTHER; note = 5-methyl
  modified_base 10..12: mod_base = OTHER; note = 5-methyl
  modified_base 10..11: mod_base = OTHER; note = bicyclic nucleic acid (BNA)
  source 1..18: mol_type = other RNA
ctgtccaagcccggttga

SEQ ID NO: 10974 - RNA, 18 nt, synthetic construct
  misc_feature 1..18: note = Description of Artificial Sequence: Synthetic Antisense oligonucleotide
  modified_base 1: mod_base = OTHER; note = 5-methyl
  modified_base 5..6: mod_base = OTHER; note = 5-methyl
  modified_base 10..12: mod_base = OTHER; note = 5-methyl
  modified_base 10: mod_base = OTHER; note = bicyclic nucleic acid (BNA)
  modified_base 17: mod_base = OTHER; note = bicyclic nucleic acid (BNA)
  source 1..18: mol_type = other RNA
ctgtccaagcccggttga

SEQ ID NO: 10975 - RNA, 18 nt, synthetic construct
  misc_feature 1..18: note = Description of Artificial Sequence: Synthetic Antisense oligonucleotide
  modified_base 1: mod_base = OTHER; note = 5-methyl
  modified_base 5..6: mod_base = OTHER; note = 5-methyl
  modified_base 10..12: mod_base = OTHER; note = 5-methyl
  modified_base 12..13: mod_base = OTHER; note = bicyclic nucleic acid (BNA)
  source 1..18: mol_type = other RNA
ctgtccaagcccggttga

SEQ ID NO: 10976 - RNA, 18 nt, synthetic construct
  misc_feature 1..18: note = Description of Artificial Sequence: Synthetic Antisense oligonucleotide
  modified_base 1: mod_base = OTHER; note = 5-methyl
  modified_base 5..6: mod_base = OTHER; note = 5-methyl
  modified_base 10..12: mod_base = OTHER; note = 5-methyl
  modified_base 5: mod_base = OTHER; note = bicyclic nucleic acid (BNA)
  modified_base 12: mod_base = OTHER; note = bicyclic nucleic acid (BNA)
  source 1..18: mol_type = other RNA
ctgtccaagcccggttga

SEQ ID NO: 10977 - RNA, 18 nt, synthetic construct
  misc_feature 1..18: note = Description of Artificial Sequence: Synthetic Antisense oligonucleotide
  modified_base 1: mod_base = OTHER; note = 5-methyl
  modified_base 5..6: mod_base = OTHER; note = 5-methyl
  modified_base 10..12: mod_base = OTHER; note = 5-methyl
  modified_base 10: mod_base = OTHER; note = bicyclic nucleic acid (BNA)
  modified_base 14: mod_base = OTHER; note = bicyclic nucleic acid (BNA)
  source 1..18: mol_type = other RNA
ctgtccaagcccggttga

SEQ ID NO: 10978 - RNA, 18 nt, synthetic construct
  misc_feature 1..18: note = Description of Artificial Sequence: Synthetic Antisense oligonucleotide
  modified_base 1: mod_base = OTHER; note = 5-methyl
  modified_base 5..6: mod_base = OTHER; note = 5-methyl
  modified_base 10..12: mod_base = OTHER; note = 5-methyl
  modified_base 6: mod_base = OTHER; note = bicyclic nucleic acid (BNA)
  modified_base 11: mod_base = OTHER; note = bicyclic nucleic acid (BNA)
  source 1..18: mol_type = other RNA
ctgtccaagcccggttga

SEQ ID NO: 10979 - RNA, 18 nt, synthetic construct
  misc_feature 1..18: note = Description of Artificial Sequence: Synthetic Antisense oligonucleotide
  modified_base 1: mod_base = OTHER; note = 5-methyl
  modified_base 5..6: mod_base = OTHER; note = 5-methyl
  modified_base 10..12: mod_base = OTHER; note = 5-methyl
  modified_base 6: mod_base = OTHER; note = bicyclic nucleic acid (BNA)
  modified_base 17: mod_base = OTHER; note = bicyclic nucleic acid (BNA)
  source 1..18: mol_type = other RNA
ctgtccaagcccggttga

SEQ ID NO: 10980 - RNA, 18 nt, synthetic construct
  misc_feature 1..18: note = Description of Artificial Sequence: Synthetic Antisense oligonucleotide
  modified_base 1: mod_base = OTHER; note = 5-methyl
  modified_base 5..6: mod_base = OTHER; note = 5-methyl
  modified_base 10..12: mod_base = OTHER; note = 5-methyl
  modified_base 9: mod_base = OTHER; note = bicyclic nucleic acid (BNA)
  modified_base 13: mod_base = OTHER; note = bicyclic nucleic acid (BNA)
  source 1..18: mol_type = other RNA
ctgtccaagcccggttga

SEQ ID NO: 10981 - RNA, 18 nt, synthetic construct
  misc_feature 1..18: note = Description of Artificial Sequence: Synthetic Antisense oligonucleotide
  modified_base 1: mod_base = OTHER; note = 5-methyl
  modified_base 5..6: mod_base = OTHER; note = 5-methyl
  modified_base 10..12: mod_base = OTHER; note = 5-methyl
  modified_base 11: mod_base = OTHER; note = bicyclic nucleic acid (BNA)
  modified_base 17: mod_base = OTHER; note = bicyclic nucleic acid (BNA)
  source 1..18: mol_type = other RNA
ctgtccaagcccggttga

SEQ ID NO: 10982 - RNA, 18 nt, synthetic construct
  misc_feature 1..18: note = Description of Artificial Sequence: Synthetic Antisense oligonucleotide
  modified_base 1: mod_base = OTHER; note = 5-methyl
  modified_base 5..6: mod_base = OTHER; note = 5-methyl
  modified_base 10..12: mod_base = OTHER; note = 5-methyl
  modified_base 3: mod_base = OTHER; note = bicyclic nucleic acid (BNA)
  modified_base 12: mod_base = OTHER; note = bicyclic nucleic acid (BNA)
  source 1..18: mol_type = other RNA
ctgtccaagcccggttga

SEQ ID NO: 10983 - RNA, 18 nt, synthetic construct
  misc_feature 1..18: note = Description of Artificial Sequence: Synthetic Antisense oligonucleotide
  modified_base 1: mod_base = OTHER; note = 5-methyl
  modified_base 5..6: mod_base = OTHER; note = 5-methyl
  modified_base 10..12: mod_base = OTHER; note = 5-methyl
  modified_base 3: mod_base = OTHER; note = bicyclic nucleic acid (BNA)
  modified_base 5: mod_base = OTHER; note = bicyclic nucleic acid (BNA)
  source 1..18: mol_type = other RNA
ctgtccaagcccggttga

SEQ ID NO: 10984 - RNA, 18 nt, synthetic construct
  misc_feature 1..18: note = Description of Artificial Sequence: Synthetic Antisense oligonucleotide
  modified_base 1: mod_base = OTHER; note = 5-methyl
  modified_base 5..6: mod_base = OTHER; note = 5-methyl
  modified_base 10..12: mod_base = OTHER; note = 5-methyl
  modified_base 10: mod_base = OTHER; note = bicyclic nucleic acid (BNA)
  modified_base 13: mod_base = OTHER; note = bicyclic nucleic acid (BNA)
  source 1..18: mol_type = other RNA
ctgtccaagcccggttga

SEQ ID NO: 10985 - RNA, 20 nt, synthetic construct
  misc_feature 1..20: note = Description of Artificial Sequence: Synthetic Antisense oligonucleotide
  modified_base 2: mod_base = OTHER; note = 5-methyl
  modified_base 14: mod_base = OTHER; note = 5-methyl
  modified_base 19: mod_base = OTHER; note = 5-methyl
  modified_base 2: mod_base = OTHER; note = bicyclic nucleic acid (BNA)
  source 1..20: mol_type = other RNA
tcaaggaagatggcatttct

SEQ ID NO: 10986 - RNA, 20 nt, synthetic construct
  misc_feature 1..20: note = Description of Artificial Sequence: Synthetic Antisense oligonucleotide
  modified_base 2: mod_base = OTHER; note = 5-methyl
  modified_base 14: mod_base = OTHER; note = 5-methyl
  modified_base 19: mod_base = OTHER; note = 5-methyl
  modified_base 9: mod_base = OTHER; note = bicyclic nucleic acid (BNA)
  source 1..20: mol_type = other RNA
tcaaggaagatggcatttct

SEQ ID NO: 10987 - RNA, 20 nt, synthetic construct
  misc_feature 1..20: note = Description of Artificial Sequence: Synthetic Antisense oligonucleotide
  modified_base 2: mod_base = OTHER; note = 5-methyl
  modified_base 14: mod_base = OTHER; note = 5-methyl
  modified_base 19: mod_base = OTHER; note = 5-methyl
  modified_base 5: mod_base = OTHER; note = bicyclic nucleic acid (BNA)
  source 1..20: mol_type = other RNA
tcaaggaagatggcatttct

SEQ ID NO: 10988 - RNA, 20 nt, synthetic construct
  misc_feature 1..20: note = Description of Artificial Sequence: Synthetic Antisense oligonucleotide
  modified_base 2: mod_base = OTHER; note = 5-methyl
  modified_base 14: mod_base = OTHER; note = 5-methyl
  modified_base 19: mod_base = OTHER; note = 5-methyl
  modified_base 6: mod_base = OTHER; note = bicyclic nucleic acid (BNA)
  source 1..20: mol_type = other RNA
tcaaggaagatggcatttct

SEQ ID NO: 10989 - RNA, 20 nt, synthetic construct
  misc_feature 1..20: note = Description of Artificial Sequence: Synthetic Antisense oligonucleotide
  modified_base 2: mod_base = OTHER; note = 5-methyl
  modified_base 14: mod_base = OTHER; note = 5-methyl
  modified_base 19: mod_base = OTHER; note = 5-methyl
  modified_base 12: mod_base = OTHER; note = bicyclic nucleic acid (BNA)
  source 1..20: mol_type = other RNA
tcaaggaagatggcatttct

SEQ ID NO: 10990 - RNA, 20 nt, synthetic construct
  misc_feature 1..20: note = Description of Artificial Sequence: Synthetic Antisense oligonucleotide
  modified_base 2: mod_base = OTHER; note = 5-methyl
  modified_base 14: mod_base = OTHER; note = 5-methyl
  modified_base 19: mod_base = OTHER; note = 5-methyl
  modified_base 13: mod_base = OTHER; note = bicyclic nucleic acid (BNA)
  source 1..20: mol_type = other RNA
tcaaggaagatggcatttct

SEQ ID NO: 10991 - RNA, 20 nt, synthetic construct
  misc_feature 1..20: note = Description of Artificial Sequence: Synthetic Antisense oligonucleotide
  modified_base 2: mod_base = OTHER; note = 5-methyl
  modified_base 14: mod_base = OTHER; note = 5-methyl
  modified_base 19: mod_base = OTHER; note = 5-methyl
  modified_base 19: mod_base = OTHER; note = bicyclic nucleic acid (BNA)
  source 1..20: mol_type = other RNA
tcaaggaagatggcatttct

SEQ ID NO: 10992 - RNA, 20 nt, synthetic construct
  misc_feature 1..20: note = Description of Artificial Sequence: Synthetic Antisense oligonucleotide
  modified_base 2: mod_base = OTHER; note = 5-methyl
  modified_base 14: mod_base = OTHER; note = 5-methyl
  modified_base 19: mod_base = OTHER; note = 5-methyl
  modified_base 14: mod_base = OTHER; note = bicyclic nucleic acid (BNA)
  source 1..20: mol_type = other RNA
tcaaggaagatggcatttct

SEQ ID NO: 10993 - RNA, 22 nt, synthetic construct
  misc_feature 1..22: note = Description of Artificial Sequence: Synthetic Antisense oligonucleotide
  modified_base 2: mod_base = OTHER; note = 5-methyl
  modified_base 14: mod_base = OTHER; note = 5-methyl
  modified_base 19: mod_base = OTHER; note = 5-methyl
  modified_base 2: mod_base = OTHER; note = bicyclic nucleic acid (BNA)
  source 1..22: mol_type = other RNA
tcaaggaagatggcatttctag

SEQ ID NO: 10994 - RNA, 22 nt, synthetic construct
  misc_feature 1..22: note = Description of Artificial Sequence: Synthetic Antisense oligonucleotide
  modified_base 2: mod_base = OTHER; note = 5-methyl
  modified_base 14: mod_base = OTHER; note = 5-methyl
  modified_base 19: mod_base = OTHER; note = 5-methyl
  modified_base 9: mod_base = OTHER; note = bicyclic nucleic acid (BNA)
  source 1..22: mol_type = other RNA
tcaaggaagatggcatttctag

SEQ ID NO: 10995 - RNA, 22 nt, synthetic construct
  misc_feature 1..22: note = Description of Artificial Sequence: Synthetic Antisense oligonucleotide
  modified_base 2: mod_base = OTHER; note = 5-methyl
  modified_base 14: mod_base = OTHER; note = 5-methyl
  modified_base 19: mod_base = OTHER; note = 5-methyl
  modified_base 5: mod_base = OTHER; note = bicyclic nucleic acid (BNA)
  source 1..22: mol_type = other RNA
tcaaggaagatggcatttctag

SEQ ID NO: 10996 - RNA, 22 nt, synthetic construct
  misc_feature 1..22: note = Description of Artificial Sequence: Synthetic Antisense oligonucleotide
  modified_base 2: mod_base = OTHER; note = 5-methyl
  modified_base 14: mod_base = OTHER; note = 5-methyl
  modified_base 19: mod_base = OTHER; note = 5-methyl
  modified_base 6: mod_base = OTHER; note = bicyclic nucleic acid (BNA)
  source 1..22: mol_type = other RNA
tcaaggaagatggcatttctag

SEQ ID NO: 10997 - RNA, 22 nt, synthetic construct
  misc_feature 1..22: note = Description of Artificial Sequence: Synthetic Antisense oligonucleotide
  modified_base 2: mod_base = OTHER; note = 5-methyl
  modified_base 14: mod_base = OTHER; note = 5-methyl
  modified_base 19: mod_base = OTHER; note = 5-methyl
  modified_base 12: mod_base = OTHER; note = bicyclic nucleic acid (BNA)
  source 1..22: mol_type = other RNA
tcaaggaagatggcatttctag

SEQ ID NO: 10998 - RNA, 22 nt, synthetic construct
  misc_feature 1..22: note = Description of Artificial Sequence: Synthetic Antisense oligonucleotide
  modified_base 2: mod_base = OTHER; note = 5-methyl
  modified_base 14: mod_base = OTHER; note = 5-methyl
  modified_base 19: mod_base = OTHER; note = 5-methyl
  modified_base 13: mod_base = OTHER; note = bicyclic nucleic acid (BNA)
  source 1..22: mol_type = other RNA
tcaaggaagatggcatttctag

SEQ ID NO: 10999 - RNA, 22 nt, synthetic construct
  misc_feature 1..22: note = Description of Artificial Sequence: Synthetic Antisense oligonucleotide
  modified_base 2: mod_base = OTHER; note = 5-methyl
  modified_base 14: mod_base = OTHER; note = 5-methyl
  modified_base 19: mod_base = OTHER; note = 5-methyl
  modified_base 19: mod_base = OTHER; note = bicyclic nucleic acid (BNA)
  source 1..22: mol_type = other RNA
tcaaggaagatggcatttctag

SEQ ID NO: 11000 - RNA, 22 nt, synthetic construct
  misc_feature 1..22: note = Description of Artificial Sequence: Synthetic Antisense oligonucleotide
  modified_base 2: mod_base = OTHER; note = 5-methyl
  modified_base 14: mod_base = OTHER; note = 5-methyl
  modified_base 19: mod_base = OTHER; note = 5-methyl
  modified_base 14: mod_base = OTHER; note = bicyclic nucleic acid (BNA)
  source 1..22: mol_type = other RNA
tcaaggaagatggcatttctag

SEQ ID NO: 11001 - RNA, 20 nt, synthetic construct
  misc_feature 1..20: note = Description of Artificial Sequence: Synthetic Antisense oligonucleotide
  modified_base 2: mod_base = OTHER; note = 5-methyl
  modified_base 14: mod_base = OTHER; note = 5-methyl
  modified_base 19: mod_base = OTHER; note = 5-methyl
  modified_base 9: mod_base = OTHER; note = bicyclic nucleic acid (BNA)
  modified_base 14: mod_base = OTHER; note = bicyclic nucleic acid (BNA)
  source 1..20: mol_type = other RNA
tcaaggaagatggcatttct

SEQ ID NO: 11002 - RNA, 20 nt, synthetic construct
  misc_feature 1..20: note = Description of Artificial Sequence: Synthetic Antisense oligonucleotide
  modified_base 2: mod_base = OTHER; note = 5-methyl
  modified_base 14: mod_base = OTHER; note = 5-methyl
  modified_base 19: mod_base = OTHER; note = 5-methyl
  modified_base 5: mod_base = OTHER; note = bicyclic nucleic acid (BNA)
  modified_base 9: mod_base = OTHER; note = bicyclic nucleic acid (BNA)
  source 1..20: mol_type = other RNA
tcaaggaagatggcatttct

SEQ ID NO: 11003 - RNA, 20 nt, synthetic construct
  misc_feature 1..20: note = Description of Artificial Sequence: Synthetic Antisense oligonucleotide
  modified_base 2: mod_base = OTHER; note = 5-methyl
  modified_base 14: mod_base = OTHER; note = 5-methyl
  modified_base 19: mod_base = OTHER; note = 5-methyl
  modified_base 5: mod_base = OTHER; note = bicyclic nucleic acid (BNA)
  modified_base 19: mod_base = OTHER; note = bicyclic nucleic acid (BNA)
  source 1..20: mol_type = other RNA
tcaaggaagatggcatttct

SEQ ID NO: 11004 - RNA, 20 nt, synthetic construct
  misc_feature 1..20: note = Description of Artificial Sequence: Synthetic Antisense oligonucleotide
  modified_base 2: mod_base = OTHER; note = 5-methyl
  modified_base 14: mod_base = OTHER; note = 5-methyl
  modified_base 19: mod_base = OTHER; note = 5-methyl
  modified_base 6: mod_base = OTHER; note = bicyclic nucleic acid (BNA)
  modified_base 14: mod_base = OTHER; note = bicyclic nucleic acid (BNA)
  source 1..20: mol_type = other RNA
tcaaggaagatggcatttct

SEQ ID NO: 11005 - RNA, 20 nt, synthetic construct
  misc_feature 1..20: note = Description of Artificial Sequence: Synthetic Antisense oligonucleotide
  modified_base 2: mod_base = OTHER; note = 5-methyl
  modified_base 14: mod_base = OTHER; note = 5-methyl
  modified_base 19: mod_base = OTHER; note = 5-methyl
  modified_base 5: mod_base = OTHER; note = bicyclic nucleic acid (BNA)
  modified_base 13: mod_base = OTHER; note = bicyclic nucleic acid (BNA)
  source 1..20: mol_type = other RNA
tcaaggaagatggcatttct

SEQ ID NO: 11006 - RNA, 20 nt, synthetic construct
  misc_feature 1..20: note = Description of Artificial Sequence: Synthetic Antisense oligonucleotide
  modified_base 2: mod_base = OTHER; note = 5-methyl
  modified_base 14: mod_base = OTHER; note = 5-methyl
  modified_base 19: mod_base = OTHER; note = 5-methyl
  modified_base 2: mod_base = OTHER; note = bicyclic nucleic acid (BNA)
  modified_base 12: mod_base = OTHER; note = bicyclic nucleic acid (BNA)
  source 1..20: mol_type = other RNA
tcaaggaagatggcatttct

SEQ ID NO: 11007 - RNA, 20 nt, synthetic construct
  misc_feature 1..20: note = Description of Artificial Sequence: Synthetic Antisense oligonucleotide
  modified_base 2: mod_base = OTHER; note = 5-methyl
  modified_base 14: mod_base = OTHER; note = 5-methyl
  modified_base 19: mod_base = OTHER; note = 5-methyl
  modified_base 6: mod_base = OTHER; note = bicyclic nucleic acid (BNA)
  modified_base 9: mod_base = OTHER; note = bicyclic nucleic acid (BNA)
  source 1..20: mol_type = other RNA
tcaaggaagatggcatttct

SEQ ID NO: 11008 - RNA, 20 nt, synthetic construct
  misc_feature 1..20: note = Description of Artificial Sequence: Synthetic Antisense oligonucleotide
  modified_base 2: mod_base = OTHER; note = 5-methyl
  modified_base 14: mod_base = OTHER; note = 5-methyl
  modified_base 19: mod_base = OTHER; note = 5-methyl
  modified_base 13..14: mod_base = OTHER; note = bicyclic nucleic acid (BNA)
  source 1..20: mol_type = other RNA
tcaaggaagatggcatttct

SEQ ID NO: 11009 - RNA, 20 nt, synthetic construct
  misc_feature 1..20: note = Description of Artificial Sequence: Synthetic Antisense oligonucleotide
  modified_base 2: mod_base = OTHER; note = 5-methyl
  modified_base 14: mod_base = OTHER; note = 5-methyl
  modified_base 19: mod_base = OTHER; note = 5-methyl
  modified_base 6: mod_base = OTHER; note = bicyclic nucleic acid (BNA)
  modified_base 13: mod_base = OTHER; note = bicyclic nucleic acid (BNA)
  source 1..20: mol_type = other RNA
tcaaggaagatggcatttct

SEQ ID NO: 11010 - RNA, 20 nt, synthetic construct
  misc_feature 1..20: note = Description of Artificial Sequence: Synthetic Antisense oligonucleotide
  modified_base 2: mod_base = OTHER; note = 5-methyl
  modified_base 14: mod_base = OTHER; note = 5-methyl
  modified_base 19: mod_base = OTHER; note = 5-methyl
  modified_base 6: mod_base = OTHER; note = bicyclic nucleic acid (BNA)
  modified_base 19: mod_base = OTHER; note = bicyclic nucleic acid (BNA)
  source 1..20: mol_type = other RNA
tcaaggaagatggcatttct

SEQ ID NO: 11011 - RNA, 20 nt, synthetic construct
  misc_feature 1..20: note = Description of Artificial Sequence: Synthetic Antisense oligonucleotide
  modified_base 2: mod_base = OTHER; note = 5-methyl
  modified_base 14: mod_base = OTHER; note = 5-methyl
  modified_base 19: mod_base = OTHER; note = 5-methyl
  modified_base 5: mod_base = OTHER; note = bicyclic nucleic acid (BNA)
  modified_base 14: mod_base = OTHER; note = bicyclic nucleic acid (BNA)
  source 1..20: mol_type = other RNA
tcaaggaagatggcatttct

SEQ ID NO: 11012 - RNA, 20 nt, synthetic construct
  misc_feature 1..20: note = Description of Artificial Sequence: Synthetic Antisense oligonucleotide
  modified_base 2: mod_base = OTHER; note = 5-methyl
  modified_base 14: mod_base = OTHER; note = 5-methyl
  modified_base 19: mod_base = OTHER; note = 5-methyl
  modified_base 2: mod_base = OTHER; note = bicyclic nucleic acid (BNA)
  modified_base 6: mod_base = OTHER; note = bicyclic nucleic acid (BNA)
  source 1..20: mol_type = other RNA
tcaaggaagatggcatttct

SEQ ID NO: 11013 - RNA, 20 nt, synthetic construct
  misc_feature 1..20: note = Description of Artificial Sequence: Synthetic Antisense oligonucleotide
  modified_base 2: mod_base = OTHER; note = 5-methyl
  modified_base 14: mod_base = OTHER; note = 5-methyl
  modified_base 19: mod_base = OTHER; note = 5-methyl
  modified_base 12: mod_base = OTHER; note = bicyclic nucleic acid (BNA)
  modified_base 19: mod_base = OTHER; note = bicyclic nucleic acid (BNA)
  source 1..20: mol_type = other RNA
tcaaggaagatggcatttct

SEQ ID NO: 11014 - RNA, 20 nt, synthetic construct
  misc_feature 1..20: note = Description of Artificial Sequence: Synthetic Antisense oligonucleotide
  modified_base 2: mod_base = OTHER; note = 5-methyl
  modified_base 14: mod_base = OTHER; note = 5-methyl
  modified_base 19: mod_base = OTHER; note = 5-methyl
  modified_base 12: mod_base = OTHER; note = bicyclic nucleic acid (BNA)
  modified_base 14: mod_base = OTHER; note = bicyclic nucleic acid (BNA)
  source 1..20: mol_type = other RNA
tcaaggaagatggcatttct

SEQ ID NO: 11015 - RNA, 20 nt, synthetic construct
  misc_feature 1..20: note = Description of Artificial Sequence: Synthetic Antisense oligonucleotide
  modified_base 2: mod_base = OTHER; note = 5-methyl
  modified_base 14: mod_base = OTHER; note = 5-methyl
  modified_base 19: mod_base = OTHER; note = 5-methyl
  modified_base 6: mod_base = OTHER; note = bicyclic nucleic acid (BNA)
  modified_base 12: mod_base = OTHER; note = bicyclic nucleic acid (BNA)
  source 1..20: mol_type = other RNA
tcaaggaagatggcatttct

SEQ ID NO: 11016 - RNA, 20 nt, synthetic construct
  misc_feature 1..20: note = Description of Artificial Sequence: Synthetic Antisense oligonucleotide
  modified_base 2: mod_base = OTHER; note = 5-methyl
  modified_base 14: mod_base = OTHER; note = 5-methyl
  modified_base 19: mod_base = OTHER; note = 5-methyl
  modified_base 5..6: mod_base = OTHER; note = bicyclic nucleic acid (BNA)
  source 1..20: mol_type = other RNA
tcaaggaagatggcatttct

SEQ ID NO: 11017 - RNA, 20 nt, synthetic construct
  misc_feature 1..20: note = Description of Artificial Sequence: Synthetic Antisense oligonucleotide
  modified_base 2: mod_base = OTHER; note = 5-methyl
  modified_base 14: mod_base = OTHER; note = 5-methyl
  modified_base 19: mod_base = OTHER; note = 5-methyl
  modified_base 2: mod_base = OTHER; note = bicyclic nucleic acid (BNA)
  modified_base 14: mod_base = OTHER; note = bicyclic nucleic acid (BNA)
  source 1..20: mol_type = other RNA
tcaaggaagatggcatttct

SEQ ID NO: 11018 - RNA, 20 nt, synthetic construct
  misc_feature 1..20: note = Description of Artificial Sequence: Synthetic Antisense oligonucleotide
  modified_base 2: mod_base = OTHER; note = 5-methyl
  modified_base 14: mod_base = OTHER; note = 5-methyl
  modified_base 19: mod_base = OTHER; note = 5-methyl
  modified_base 9: mod_base = OTHER; note = bicyclic nucleic acid (BNA)
  modified_base 12: mod_base = OTHER; note = bicyclic nucleic acid (BNA)
  source 1..20: mol_type = other RNA
tcaaggaagatggcatttct

SEQ ID NO: 11019 - RNA, 20 nt, synthetic construct
  misc_feature 1..20: note = Description of Artificial Sequence: Synthetic Antisense oligonucleotide
  modified_base 2: mod_base = OTHER; note = 5-methyl
  modified_base 14: mod_base = OTHER; note = 5-methyl
  modified_base 19: mod_base = OTHER; note = 5-methyl
  modified_base 2: mod_base = OTHER; note = bicyclic nucleic acid (BNA)
  modified_base 5: mod_base = OTHER; note = bicyclic nucleic acid (BNA)
  source 1..20: mol_type = other RNA
tcaaggaagatggcatttct

SEQ ID NO: 11020 - RNA, 20 nt, synthetic construct
  misc_feature 1..20: note = Description of Artificial Sequence: Synthetic Antisense oligonucleotide
  modified_base 2: mod_base = OTHER; note = 5-methyl
  modified_base 14: mod_base = OTHER; note = 5-methyl
  modified_base 19: mod_base = OTHER; note = 5-methyl
  modified_base 13: mod_base = OTHER; note = bicyclic nucleic acid (BNA)
  modified_base 19: mod_base = OTHER; note = bicyclic nucleic acid (BNA)
  source 1..20: mol_type = other RNA
tcaaggaagatggcatttct

SEQ ID NO: 11021 - RNA, 20 nt, synthetic construct
  misc_feature 1..20: note = Description of Artificial Sequence: Synthetic Antisense oligonucleotide
  modified_base 2: mod_base = OTHER; note = 5-methyl
  modified_base 14: mod_base = OTHER; note = 5-methyl
  modified_base 19: mod_base = OTHER; note = 5-methyl
  modified_base 12..13: mod_base = OTHER; note = bicyclic nucleic acid (BNA)
  source 1..20: mol_type = other RNA
tcaaggaagatggcatttct

SEQ ID NO: 11022 - RNA, 20 nt, synthetic construct
  misc_feature 1..20: note = Description of Artificial Sequence: Synthetic Antisense oligonucleotide
  modified_base 2: mod_base = OTHER; note = 5-methyl
  modified_base 14: mod_base = OTHER; note = 5-methyl
  modified_base 19: mod_base = OTHER; note = 5-methyl
  modified_base 5: mod_base = OTHER; note = bicyclic nucleic acid (BNA)
  modified_base 12: mod_base = OTHER; note = bicyclic nucleic acid (BNA)
  source 1..20: mol_type = other RNA
tcaaggaagatggcatttct

SEQ ID NO: 11023 - RNA, 20 nt, synthetic construct
  misc_feature 1..20: note = Description of Artificial Sequence: Synthetic Antisense oligonucleotide
  modified_base 2: mod_base = OTHER; note = 5-methyl
  modified_base 14: mod_base = OTHER; note = 5-methyl
  modified_base 19: mod_base = OTHER; note = 5-methyl
  modified_base 2: mod_base = OTHER; note = bicyclic nucleic acid (BNA)
  modified_base 13: mod_base = OTHER; note = bicyclic nucleic acid (BNA)
  source 1..20: mol_type = other RNA
tcaaggaagatggcatttct

SEQ ID NO: 11024 - RNA, 20 nt, synthetic construct
  misc_feature 1..20: note = Description of Artificial Sequence: Synthetic Antisense oligonucleotide
  modified_base 2: mod_base = OTHER; note = 5-methyl
  modified_base 14: mod_base = OTHER; note = 5-methyl
  modified_base 19: mod_base = OTHER; note = 5-methyl
  modified_base 9: mod_base = OTHER; note = bicyclic nucleic acid (BNA)
  modified_base 13: mod_base = OTHER; note = bicyclic nucleic acid (BNA)
  source 1..20: mol_type = other RNA
tcaaggaagatggcatttct

SEQ ID NO: 11025 - RNA, 20 nt, synthetic construct
  misc_feature 1..20: note = Description of Artificial Sequence: Synthetic Antisense oligonucleotide
  modified_base 2: mod_base = OTHER; note = 5-methyl
  modified_base 14: mod_base = OTHER; note = 5-methyl
  modified_base 19: mod_base = OTHER; note = 5-methyl
  modified_base 2: mod_base = OTHER; note = bicyclic nucleic acid (BNA)
  modified_base 19: mod_base = OTHER; note = bicyclic nucleic acid (BNA)
  source 1..20: mol_type = other RNA
tcaaggaagatggcatttct

SEQ ID NO: 11026 - RNA, 20 nt, synthetic construct
  misc_feature 1..20: note = Description of Artificial Sequence: Synthetic Antisense oligonucleotide
  modified_base 2: mod_base = OTHER; note = 5-methyl
  modified_base 14: mod_base = OTHER; note = 5-methyl
  modified_base 19: mod_base = OTHER; note = 5-methyl
  modified_base 2: mod_base = OTHER; note = bicyclic nucleic acid (BNA)
  modified_base 9: mod_base = OTHER; note = bicyclic nucleic acid (BNA)
  source 1..20: mol_type = other RNA
tcaaggaagatggcatttct

SEQ ID NO: 11027 - RNA, 20 nt, synthetic construct
  misc_feature 1..20: note = Description of Artificial Sequence: Synthetic Antisense oligonucleotide
  modified_base 2: mod_base = OTHER; note = 5-methyl
  modified_base 14: mod_base = OTHER; note = 5-methyl
  modified_base 19: mod_base = OTHER; note = 5-methyl
  modified_base 14: mod_base = OTHER; note = bicyclic nucleic acid (BNA)
  modified_base 19: mod_base = OTHER; note = bicyclic nucleic acid (BNA)
  source 1..20: mol_type = other RNA
tcaaggaagatggcatttct

SEQ ID NO: 11028 - RNA, 20 nt, synthetic construct
  misc_feature 1..20: note = Description of Artificial Sequence: Synthetic Antisense oligonucleotide
  modified_base 2: mod_base = OTHER; note = 5-methyl
  modified_base 14: mod_base = OTHER; note = 5-methyl
  modified_base 19: mod_base = OTHER; note = 5-methyl
  modified_base 9: mod_base = OTHER; note = bicyclic nucleic acid (BNA)
  modified_base 19: mod_base = OTHER; note = bicyclic nucleic acid (BNA)
  source 1..20: mol_type = other RNA
tcaaggaagatggcatttct

SEQ ID NO: 11029 - RNA, 22 nt, synthetic construct
  misc_feature 1..22: note = Description of Artificial Sequence: Synthetic Antisense oligonucleotide
  modified_base 2: mod_base = OTHER; note = 5-methyl
  modified_base 14: mod_base = OTHER; note = 5-methyl
  modified_base 19: mod_base = OTHER; note = 5-methyl
  modified_base 9: mod_base = OTHER; note = bicyclic nucleic acid (BNA)
  modified_base 14: mod_base = OTHER; note = bicyclic nucleic acid (BNA)
  source 1..22: mol_type = other RNA
tcaaggaagatggcatttctag

SEQ ID NO: 11030 - RNA, 22 nt, synthetic construct
  misc_feature 1..22: note = Description of Artificial Sequence: Synthetic Antisense oligonucleotide
  modified_base 2: mod_base = OTHER; note = 5-methyl
  modified_base 14: mod_base = OTHER; note = 5-methyl
  modified_base 19: mod_base = OTHER; note = 5-methyl
  modified_base 5: mod_base = OTHER; note = bicyclic nucleic acid (BNA)
  modified_base 9: mod_base = OTHER; note = bicyclic nucleic acid (BNA)
  source 1..22: mol_type = other RNA
tcaaggaagatggcatttctag

SEQ ID NO: 11031 - RNA, 22 nt, synthetic construct
  misc_feature 1..22: note = Description of Artificial Sequence: Synthetic Antisense oligonucleotide
  modified_base 2: mod_base = OTHER; note = 5-methyl
  modified_base 14: mod_base = OTHER; note = 5-methyl
  modified_base 19: mod_base = OTHER; note = 5-methyl
  modified_base 5: mod_base = OTHER; note = bicyclic nucleic acid (BNA)
  modified_base 19: mod_base = OTHER; note = bicyclic nucleic acid (BNA)
  source 1..22: mol_type = other RNA
tcaaggaagatggcatttctag

SEQ ID NO: 11032 - RNA, 22 nt, synthetic construct
  misc_feature 1..22: note = Description of Artificial Sequence: Synthetic Antisense oligonucleotide
  modified_base 2: mod_base = OTHER; note = 5-methyl
  modified_base 14: mod_base = OTHER; note = 5-methyl
  modified_base 19: mod_base = OTHER; note = 5-methyl
  modified_base 6: mod_base = OTHER; note = bicyclic nucleic acid (BNA)
  modified_base 14: mod_base = OTHER; note = bicyclic nucleic acid (BNA)
  source 1..22: mol_type = other RNA
tcaaggaagatggcatttctag

SEQ ID NO: 11033 - RNA, 22 nt, synthetic construct
  misc_feature 1..22: note = Description of Artificial Sequence: Synthetic Antisense oligonucleotide
  modified_base 2: mod_base = OTHER; note = 5-methyl
  modified_base 14: mod_base = OTHER; note = 5-methyl
  modified_base 19: mod_base = OTHER; note = 5-methyl
  modified_base 5: mod_base = OTHER; note = bicyclic nucleic acid (BNA)
  modified_base 13: mod_base = OTHER; note = bicyclic nucleic acid (BNA)
  source 1..22: mol_type = other RNA
tcaaggaagatggcatttctag

SEQ ID NO: 11034 - RNA, 22 nt, synthetic construct
  misc_feature 1..22: note = Description of Artificial Sequence: Synthetic Antisense oligonucleotide
  modified_base 2: mod_base = OTHER; note = 5-methyl
  modified_base 14: mod_base = OTHER; note = 5-methyl
  modified_base 19: mod_base = OTHER; note = 5-methyl
  modified_base 2: mod_base = OTHER; note = bicyclic nucleic acid (BNA)
  modified_base 12: mod_base = OTHER; note = bicyclic nucleic acid (BNA)
  source 1..22: mol_type = other RNA
tcaaggaagatggcatttctag

SEQ ID NO: 11035 - RNA, 22 nt, synthetic construct
  misc_feature 1..22: note = Description of Artificial Sequence: Synthetic Antisense oligonucleotide
  modified_base 2: mod_base = OTHER; note = 5-methyl
  modified_base 14: mod_base = OTHER; note = 5-methyl
  modified_base 19: mod_base = OTHER; note = 5-methyl
  modified_base 6: mod_base = OTHER; note = bicyclic nucleic acid (BNA)
  modified_base 9: mod_base = OTHER; note = bicyclic nucleic acid (BNA)
  source 1..22: mol_type = other RNA
tcaaggaagatggcatttctag

SEQ ID NO: 11036 - RNA, 22 nt, synthetic construct
  misc_feature 1..22: note = Description of Artificial Sequence: Synthetic Antisense oligonucleotide
  modified_base 2: mod_base = OTHER; note = 5-methyl
  modified_base 14: mod_base = OTHER; note = 5-methyl
  modified_base 19: mod_base = OTHER; note = 5-methyl
  modified_base 13..14: mod_base = OTHER; note = bicyclic nucleic acid (BNA)
  source 1..22: mol_type = other RNA
tcaaggaagatggcatttctag

SEQ ID NO: 11037 - RNA, 22 nt, synthetic construct
  misc_feature 1..22: note = Description of Artificial Sequence: Synthetic Antisense oligonucleotide
  modified_base 2: mod_base = OTHER; note = 5-methyl
  modified_base 14: mod_base = OTHER; note = 5-methyl
  modified_base 19: mod_base = OTHER; note = 5-methyl
  modified_base 6: mod_base = OTHER; note = bicyclic nucleic acid (BNA)
  modified_base 13: mod_base = OTHER; note = bicyclic nucleic acid (BNA)
  source 1..22: mol_type = other RNA
tcaaggaagatggcatttctag

SEQ ID NO: 11038 - RNA, 22 nt, synthetic construct
  misc_feature 1..22: note = Description of Artificial Sequence: Synthetic Antisense oligonucleotide
  modified_base 2: mod_base = OTHER; note = 5-methyl
  modified_base 14: mod_base = OTHER; note = 5-methyl
  modified_base 19: mod_base = OTHER; note = 5-methyl
  modified_base 6: mod_base = OTHER; note = bicyclic nucleic acid (BNA)
  modified_base 19: mod_base = OTHER; note = bicyclic nucleic acid (BNA)
  source 1..22: mol_type = other RNA
tcaaggaagatggcatttctag

SEQ ID NO: 11039 - RNA, 22 nt, synthetic construct
  misc_feature 1..22: note = Description of Artificial Sequence: Synthetic Antisense oligonucleotide
  modified_base 2: mod_base = OTHER; note = 5-methyl
  modified_base 14: mod_base = OTHER; note = 5-methyl
  modified_base 19: mod_base = OTHER; note = 5-methyl
  modified_base 5: mod_base = OTHER; note = bicyclic nucleic acid (BNA)
  modified_base 14: mod_base = OTHER; note = bicyclic nucleic acid (BNA)
  source 1..22: mol_type = other RNA
tcaaggaagatggcatttctag

SEQ ID NO: 11040 - RNA, 22 nt, synthetic construct
  misc_feature 1..22: note = Description of Artificial Sequence: Synthetic Antisense oligonucleotide
  modified_base 2: mod_base = OTHER; note = 5-methyl
  modified_base 14: mod_base = OTHER; note = 5-methyl
  modified_base 19: mod_base = OTHER; note = 5-methyl
  modified_base 2: mod_base = OTHER; note = bicyclic nucleic acid (BNA)
  modified_base 6: mod_base = OTHER; note = bicyclic nucleic acid (BNA)
  source 1..22: mol_type = other RNA
tcaaggaagatggcatttctag

SEQ ID NO: 11041 - RNA, 22 nt, synthetic construct
  misc_feature 1..22: note = Description of Artificial Sequence: Synthetic Antisense oligonucleotide
  modified_base 2: mod_base = OTHER; note = 5-methyl
  modified_base 14: mod_base = OTHER; note = 5-methyl
  modified_base 19: mod_base = OTHER; note = 5-methyl
  modified_base 12: mod_base = OTHER; note = bicyclic nucleic acid (BNA)
  modified_base 19: mod_base = OTHER; note = bicyclic nucleic acid (BNA)
  source 1..22: mol_type = other RNA
tcaaggaagatggcatttctag

SEQ ID NO: 11042 - RNA, 22 nt, synthetic construct
  misc_feature 1..22: note = Description of Artificial Sequence: Synthetic Antisense oligonucleotide
  modified_base 2: mod_base = OTHER; note = 5-methyl
  modified_base 14: mod_base = OTHER; note = 5-methyl
  modified_base 19: mod_base = OTHER; note = 5-methyl
  modified_base 12: mod_base = OTHER; note = bicyclic nucleic acid (BNA)
  modified_base 14: mod_base = OTHER; note = bicyclic nucleic acid (BNA)
  source 1..22: mol_type = other RNA
tcaaggaagatggcatttctag

SEQ ID NO: 11043 - RNA, 22 nt, synthetic construct
  misc_feature 1..22: note = Description of Artificial Sequence: Synthetic Antisense oligonucleotide
  modified_base 2: mod_base = OTHER; note = 5-methyl
  modified_base 14: mod_base = OTHER; note = 5-methyl
  modified_base 19: mod_base = OTHER; note = 5-methyl
  modified_base 6: mod_base = OTHER; note = bicyclic nucleic acid (BNA)
  modified_base 12: mod_base = OTHER; note = bicyclic nucleic acid (BNA)
  source 1..22: mol_type = other RNA
tcaaggaagatggcatttctag

SEQ ID NO: 11044 - RNA, 22 nt, synthetic construct
  misc_feature 1..22: note = Description of Artificial Sequence: Synthetic Antisense oligonucleotide
  modified_base 2: mod_base = OTHER; note = 5-methyl
  modified_base 14: mod_base = OTHER; note = 5-methyl
  modified_base 19: mod_base = OTHER; note = 5-methyl
  modified_base 5..6: mod_base = OTHER; note = bicyclic nucleic acid (BNA)
  source 1..22: mol_type = other RNA
tcaaggaagatggcatttctag

SEQ ID NO: 11045 - RNA, 22 nt, synthetic construct
  misc_feature 1..22: note = Description of Artificial Sequence: Synthetic Antisense oligonucleotide
  modified_base 2: mod_base = OTHER; note = 5-methyl
  modified_base 14: mod_base = OTHER; note = 5-methyl
  modified_base 19: mod_base = OTHER; note = 5-methyl
  modified_base 2: mod_base = OTHER; note = bicyclic nucleic acid (BNA)
  modified_base 14: mod_base = OTHER; note = bicyclic nucleic acid (BNA)
  source 1..22: mol_type = other RNA
tcaaggaagatggcatttctag

SEQ ID NO: 11046 - RNA, 22 nt, synthetic construct
  misc_feature 1..22: note = Description of Artificial Sequence: Synthetic Antisense oligonucleotide
  modified_base 2: mod_base = OTHER; note = 5-methyl
  modified_base 14: mod_base = OTHER; note = 5-methyl
  modified_base 19: mod_base = OTHER; note = 5-methyl
  modified_base 9: mod_base = OTHER; note = bicyclic nucleic acid (BNA)
  modified_base 12: mod_base = OTHER; note = bicyclic nucleic acid (BNA)
  source 1..22: mol_type = other RNA
tcaaggaagatggcatttctag

SEQ ID NO: 11047 - RNA, 22 nt, synthetic construct
  misc_feature 1..22: note = Description of Artificial Sequence: Synthetic Antisense oligonucleotide
  modified_base 2: mod_base = OTHER; note = 5-methyl
  modified_base 14: mod_base = OTHER; note = 5-methyl
  modified_base 19: mod_base = OTHER; note = 5-methyl
  modified_base 2: mod_base = OTHER; note = bicyclic nucleic acid (BNA)
  modified_base 5: mod_base = OTHER; note = bicyclic nucleic acid (BNA)
  source 1..22: mol_type = other RNA
tcaaggaagatggcatttctag

SEQ ID NO: 11048 - RNA, 22 nt, synthetic construct
  misc_feature 1..22: note = Description of Artificial Sequence: Synthetic Antisense oligonucleotide
  modified_base 2: mod_base = OTHER; note = 5-methyl
  modified_base 14: mod_base = OTHER; note = 5-methyl
  modified_base 19: mod_base = OTHER; note = 5-methyl
  modified_base 13: mod_base = OTHER; note = bicyclic nucleic acid (BNA)
  modified_base 19: mod_base = OTHER; note = bicyclic nucleic acid (BNA)
  source 1..22: mol_type = other RNA
tcaaggaagatggcatttctag

SEQ ID NO: 11049 - RNA, 22 nt, synthetic construct
  misc_feature 1..22: note = Description of Artificial Sequence: Synthetic Antisense oligonucleotide
  modified_base 2: mod_base = OTHER; note = 5-methyl
  modified_base 14: mod_base = OTHER; note = 5-methyl
  modified_base 19: mod_base = OTHER; note = 5-methyl
  modified_base 12..13: mod_base = OTHER; note = bicyclic nucleic acid (BNA)
  source 1..22: mol_type = other RNA
tcaaggaagatggcatttctag

SEQ ID NO: 11050 - RNA, 22 nt, synthetic construct
  misc_feature 1..22: note = Description of Artificial Sequence: Synthetic Antisense oligonucleotide
  modified_base 2: mod_base = OTHER; note = 5-methyl
  modified_base 14: mod_base = OTHER; note = 5-methyl
  modified_base 19: mod_base = OTHER; note = 5-methyl
  modified_base 5: mod_base = OTHER; note = bicyclic nucleic acid (BNA)
  modified_base 12: mod_base = OTHER; note = bicyclic nucleic acid (BNA)
  source 1..22: mol_type = other RNA
tcaaggaagatggcatttctag

SEQ ID NO: 11051 - RNA, 22 nt, synthetic construct
  misc_feature 1..22: note = Description of Artificial Sequence: Synthetic Antisense oligonucleotide
  modified_base 2: mod_base = OTHER; note = 5-methyl
  modified_base 14: mod_base = OTHER; note = 5-methyl
  modified_base 19: mod_base = OTHER; note = 5-methyl
  modified_base 2: mod_base = OTHER; note = bicyclic nucleic acid (BNA)
  modified_base 13: mod_base = OTHER; note = bicyclic nucleic acid (BNA)
  source 1..22: mol_type = other RNA
tcaaggaagatggcatttctag

SEQ ID NO: 11052 - RNA, 22 nt, synthetic construct
  misc_feature 1..22: note = Description of Artificial Sequence: Synthetic Antisense oligonucleotide
  modified_base 2: mod_base = OTHER; note = 5-methyl
  modified_base 14: mod_base = OTHER; note = 5-methyl
  modified_base 19: mod_base = OTHER; note = 5-methyl
  modified_base 9: mod_base = OTHER; note = bicyclic nucleic acid (BNA)
  modified_base 13: mod_base = OTHER; note = bicyclic nucleic acid (BNA)
  source 1..22: mol_type = other RNA
tcaaggaagatggcatttctag

SEQ ID NO: 11053 - RNA, 22 nt, synthetic construct
  misc_feature 1..22: note = Description of Artificial Sequence: Synthetic Antisense oligonucleotide
  modified_base 2: mod_base = OTHER; note = 5-methyl
  modified_base 14: mod_base = OTHER; note = 5-methyl
  modified_base 19: mod_base = OTHER; note = 5-methyl
  modified_base 2: mod_base = OTHER; note = bicyclic nucleic acid (BNA)
  modified_base 19: mod_base = OTHER; note = bicyclic nucleic acid (BNA)
  source 1..22: mol_type = other RNA
tcaaggaagatggcatttctag

SEQ ID NO: 11054 - RNA, 22 nt, synthetic construct
  misc_feature 1..22: note = Description of Artificial Sequence: Synthetic Antisense oligonucleotide
  modified_base 2: mod_base = OTHER; note = 5-methyl
  modified_base 14: mod_base = OTHER; note = 5-methyl
  modified_base 19: mod_base = OTHER; note = 5-methyl
  modified_base 2: mod_base = OTHER; note = bicyclic nucleic acid (BNA)
  modified_base 9: mod_base = OTHER; note = bicyclic nucleic acid (BNA)
  source 1..22: mol_type = other RNA
tcaaggaagatggcatttctag

SEQ ID NO: 11055 - RNA, 22 nt, synthetic construct
  misc_feature 1..22: note = Description of Artificial Sequence: Synthetic Antisense oligonucleotide
  modified_base 2: mod_base = OTHER; note = 5-methyl
  modified_base 14: mod_base = OTHER; note = 5-methyl
  modified_base 19: mod_base = OTHER; note = 5-methyl
  modified_base 14: mod_base = OTHER; note = bicyclic nucleic acid (BNA)
  modified_base 19: mod_base = OTHER; note = bicyclic nucleic acid (BNA)
  source 1..22: mol_type = other RNA
tcaaggaagatggcatttctag

SEQ ID NO: 11056 - RNA, 22 nt, synthetic construct
  misc_feature 1..22: note = Description of Artificial Sequence: Synthetic Antisense oligonucleotide
  modified_base 2: mod_base = OTHER; note = 5-methyl
  modified_base 14: mod_base = OTHER; note = 5-methyl
  modified_base 19: mod_base = OTHER; note = 5-methyl
  modified_base 9: mod_base = OTHER; note = bicyclic nucleic acid (BNA)
  modified_base 19: mod_base = OTHER; note = bicyclic nucleic acid (BNA)
  source 1..22: mol_type = other RNA
tcaaggaagatggcatttctag

SEQ ID NO: 11057 - DNA, 18 bp, synthetic construct
  misc_feature 1..18: note = Description of Artificial Sequence: Synthetic Antisense oligonucleotide
  modified_base 2: mod_base = OTHER; note = bicyclic nucleic acid (BNA)
  source 1..18: mol_type = other DNA
ggtaagttctgtccaagc

SEQ ID NO: 11058 - DNA, 18 bp, synthetic construct
  misc_feature 1..18: note = Description of Artificial Sequence: Synthetic Antisense oligonucleotide
  modified_base 9: mod_base = OTHER; note = bicyclic nucleic acid (BNA)
  source 1..18: mol_type = other DNA
ggtaagttctgtccaagc

SEQ ID NO: 11059 - DNA, 18 bp, synthetic construct
  misc_feature 1..18: note = Description of Artificial Sequence: Synthetic Antisense oligonucleotide
  modified_base 11: mod_base = OTHER; note = bicyclic nucleic acid (BNA)
  source 1..18: mol_type = other DNA
ggtaagttctgtccaagc

SEQ ID NO: 11060 - DNA, 18 bp, synthetic construct
  misc_feature 1..18: note = Description of Artificial Sequence: Synthetic Antisense oligonucleotide
  modified_base 6: mod_base = OTHER; note = bicyclic nucleic acid (BNA)
  source 1..18: mol_type = other DNA
ggtaagttctgtccaagc

SEQ ID NO: 11061 - DNA, 18 bp, synthetic construct
  misc_feature 1..18: note = Description of Artificial Sequence: Synthetic Antisense oligonucleotide
  modified_base 17: mod_base = OTHER; note = bicyclic nucleic acid (BNA)
  source 1..18: mol_type = other DNA
ggtaagttctgtccaagc

SEQ ID NO: 11062 - DNA, 18 bp, synthetic construct
  misc_feature 1..18: note = Description of Artificial Sequence: Synthetic Antisense oligonucleotide
  modified_base 13: mod_base = OTHER; note = bicyclic nucleic acid (BNA)
  source 1..18: mol_type = other DNA
ggtaagttctgtccaagc

SEQ ID NO: 11063 - DNA, 18 bp, synthetic construct
  misc_feature 1..18: note = Description of Artificial Sequence: Synthetic Antisense oligonucleotide
  modified_base 14: mod_base = OTHER; note = bicyclic nucleic acid (BNA)
  source 1..18: mol_type = other DNA
ggtaagttctgtccaagc

SEQ ID NO: 11064 - DNA, 18 bp, synthetic construct
  misc_feature 1..18: note = Description of Artificial Sequence: Synthetic Antisense oligonucleotide
  modified_base 16: mod_base = OTHER; note = bicyclic nucleic acid (BNA)
  source 1..18: mol_type = other DNA
gtaagttctgtccaagcc

SEQ ID NO: 11065 - DNA, 18 bp, synthetic construct
  misc_feature 1..18: note = Description of Artificial Sequence: Synthetic Antisense oligonucleotide
  modified_base 10: mod_base = OTHER; note = bicyclic nucleic acid (BNA)
  source 1..18: mol_type = other DNA
gtaagttctgtccaagcc

SEQ ID NO: 11066 - DNA, 18 bp, synthetic construct
  misc_feature 1..18: note = Description of Artificial Sequence: Synthetic Antisense oligonucleotide
  modified_base 5: mod_base = OTHER; note = bicyclic nucleic acid (BNA)
  source 1..18: mol_type = other DNA
gtaagttctgtccaagcc

SEQ ID NO: 11067 - DNA, 18 bp, synthetic construct
  misc_feature 1..18: note = Description of Artificial Sequence: Synthetic Antisense oligonucleotide
  modified_base 17: mod_base = OTHER; note = bicyclic nucleic acid (BNA)
  source 1..18: mol_type = other DNA
gtaagttctgtccaagcc

SEQ ID NO: 11068 - DNA, 18 bp, synthetic construct
  misc_feature 1..18: note = Description of Artificial Sequence: Synthetic Antisense oligonucleotide
  modified_base 12: mod_base = OTHER; note = bicyclic nucleic acid (BNA)
  source 1..18: mol_type = other DNA
gtaagttctgtccaagcc

SEQ ID NO: 11069 - DNA, 18 bp, synthetic construct
  misc_feature 1..18: note = Description of Artificial Sequence: Synthetic Antisense oligonucleotide
  modified_base 13: mod_base = OTHER; note = bicyclic nucleic acid (BNA)
  source 1..18: mol_type = other DNA
gtaagttctgtccaagcc

SEQ ID NO: 11070 - DNA, 18 bp, synthetic construct
  misc_feature 1..18: note = Description of Artificial Sequence: Synthetic Antisense oligonucleotide
  modified_base 8: mod_base = OTHER; note = bicyclic nucleic acid (BNA)
  source 1..18: mol_type = other DNA
gtaagttctgtccaagcc

SEQ ID NO: 11071 - DNA, 18 bp, synthetic construct
  misc_feature 1..18: note = Description of Artificial Sequence: Synthetic Antisense oligonucleotide
  modified_base 2: mod_base = OTHER; note = bicyclic nucleic acid (BNA)
  source 1..18: mol_type = other DNA
agtcggtaagttctgtcc

SEQ ID NO: 11072 - DNA, 18 bp, synthetic construct
  misc_feature 1..18: note = Description of Artificial Sequence: Synthetic Antisense oligonucleotide
  modified_base 4: mod_base = OTHER; note = bicyclic nucleic acid (BNA)
  source 1..18: mol_type = other DNA
agtcggtaagttctgtcc

SEQ ID NO: 11073 - DNA, 18 bp, synthetic construct
  misc_feature 1..18: note = Description of Artificial Sequence: Synthetic Antisense oligonucleotide
  modified_base 10: mod_base = OTHER; note = bicyclic nucleic acid (BNA)
  source 1..18: mol_type = other DNA
agtcggtaagttctgtcc

SEQ ID NO: 11074 - DNA, 18 bp, synthetic construct
  misc_feature 1..18: note = Description of Artificial Sequence: Synthetic Antisense oligonucleotide
  modified_base 5: mod_base = OTHER; note = bicyclic nucleic acid (BNA)
  source 1..18: mol_type = other DNA
agtcggtaagttctgtcc

SEQ ID NO: 11075 - DNA, 18 bp, synthetic construct
  misc_feature 1..18: note = Description of Artificial Sequence: Synthetic Antisense oligonucleotide
  modified_base 6: mod_base = OTHER; note = bicyclic nucleic acid (BNA)
  source 1..18: mol_type = other DNA
agtcggtaagttctgtcc

SEQ ID NO: 11076 - DNA, 18 bp, synthetic construct
  misc_feature 1..18: note = Description of Artificial Sequence: Synthetic Antisense oligonucleotide
  modified_base 17: mod_base = OTHER; note = bicyclic nucleic acid (BNA)
  source 1..18: mol_type = other DNA
agtcggtaagttctgtcc

SEQ ID NO: 11077 - DNA, 18 bp, synthetic construct
  misc_feature 1..18: note = Description of Artificial Sequence: Synthetic Antisense oligonucleotide
  modified_base 13: mod_base = OTHER; note = bicyclic nucleic acid (BNA)
  source 1..18: mol_type = other DNA
agtcggtaagttctgtcc

SEQ ID NO: 11078 - DNA, 18 bp, synthetic construct
  misc_feature 1..18: note = Description of Artificial Sequence: Synthetic Antisense oligonucleotide
  modified_base 15: mod_base = OTHER; note = bicyclic nucleic acid (BNA)
  source 1..18: mol_type = other DNA
agtcggtaagttctgtcc

SEQ ID NO: 11079 - DNA, 18 bp, synthetic construct
  misc_feature 1..18: note = Description of Artificial Sequence: Synthetic Antisense oligonucleotide
  modified_base 3: mod_base = OTHER; note = bicyclic nucleic acid (BNA)
  source 1..18: mol_type = other DNA
ctgtccaagcccggttga

SEQ ID NO: 11080 - DNA, 18 bp, synthetic construct
  misc_feature 1..18: note = Description of Artificial Sequence: Synthetic Antisense oligonucleotide
  modified_base 9: mod_base = OTHER; note = bicyclic nucleic acid (BNA)
  source 1..18: mol_type = other DNA
ctgtccaagcccggttga

SEQ ID NO: 11081 - DNA, 18 bp, synthetic construct
  misc_feature 1..18: note = Description of Artificial Sequence: Synthetic Antisense oligonucleotide
  modified_base 10: mod_base = OTHER; note = bicyclic nucleic acid (BNA)
  source 1..18: mol_type = other DNA
ctgtccaagcccggttga

SEQ ID NO: 11082 - DNA, 18 bp, synthetic construct
  misc_feature 1..18: note = Description of Artificial Sequence: Synthetic Antisense oligonucleotide
  modified_base 5: mod_base = OTHER; note = bicyclic nucleic acid (BNA)
  source 1..18: mol_type = other DNA
ctgtccaagcccggttga

SEQ ID NO: 11083 - DNA, 18 bp, synthetic construct
  misc_feature 1..18: note = Description of Artificial Sequence: Synthetic Antisense oligonucleotide
  modified_base 11: mod_base = OTHER; note = bicyclic nucleic acid (BNA)
  source 1..18: mol_type = other DNA
ctgtccaagcccggttga

SEQ ID NO: 11084 - DNA, 18 bp, synthetic construct
  misc_feature 1..18: note = Description of Artificial Sequence: Synthetic Antisense oligonucleotide
  modified_base 6: mod_base = OTHER; note = bicyclic nucleic acid (BNA)
  source 1..18: mol_type = other DNA
ctgtccaagcccggttga

SEQ ID NO: 11085 - DNA, 18 bp, synthetic construct
  misc_feature 1..18: note = Description of Artificial Sequence: Synthetic Antisense oligonucleotide
  modified_base 17: mod_base = OTHER; note = bicyclic nucleic acid (BNA)
  source 1..18: mol_type = other DNA
ctgtccaagcccggttga

SEQ ID NO: 11086 - DNA, 18 bp, synthetic construct
  misc_feature 1..18: note = Description of Artificial Sequence: Synthetic Antisense oligonucleotide
  modified_base 12: mod_base = OTHER; note = bicyclic nucleic acid (BNA)
  source 1..18: mol_type = other DNA
ctgtccaagcccggttga

SEQ ID NO: 11087 - DNA, 18 bp, synthetic construct
  misc_feature 1..18: note = Description of Artificial Sequence: Synthetic Antisense oligonucleotide
  modified_base 13: mod_base = OTHER; note = bicyclic nucleic acid (BNA)
  source 1..18: mol_type = other DNA
ctgtccaagcccggttga

SEQ ID NO: 11088 - DNA, 18 bp, synthetic construct
  misc_feature 1..18: note = Description of Artificial Sequence: Synthetic Antisense oligonucleotide
  modified_base 14: mod_base = OTHER; note = bicyclic nucleic acid (BNA)
  source 1..18: mol_type = other DNA
ctgtccaagcccggttga

SEQ ID NO: 11089 - DNA, 18 bp, synthetic construct
  misc_feature 1..18: note = Description of Artificial Sequence: Synthetic Antisense oligonucleotide
  modified_base 9: mod_base = OTHER; note = bicyclic nucleic acid (BNA)
  modified_base 14: mod_base = OTHER; note = bicyclic nucleic acid (BNA)
  source 1..18: mol_type = other DNA
ggtaagttctgtccaagc

SEQ ID NO: 11090 - DNA, 18 bp, synthetic construct
  misc_feature 1..18: note = Description of Artificial Sequence: Synthetic Antisense oligonucleotide
  modified_base 6: mod_base = OTHER; note = bicyclic nucleic acid (BNA)
  modified_base 14: mod_base = OTHER; note = bicyclic nucleic acid (BNA)
  source 1..18: mol_type = other DNA
ggtaagttctgtccaagc

SEQ ID NO: 11091 - DNA, 18 bp, synthetic construct
  misc_feature 1..18: note = Description of Artificial Sequence: Synthetic Antisense oligonucleotide
  modified_base 13: mod_base = OTHER; note = bicyclic nucleic acid (BNA)
  modified_base 17: mod_base = OTHER; note = bicyclic nucleic acid (BNA)
  source 1..18: mol_type = other DNA
ggtaagttctgtccaagc

SEQ ID NO: 11092 - DNA, 18 bp, synthetic construct
  misc_feature 1..18: note = Description of Artificial Sequence: Synthetic Antisense oligonucleotide
  modified_base 6: mod_base = OTHER; note = bicyclic nucleic acid (BNA)
  modified_base 9: mod_base = OTHER; note = bicyclic nucleic acid (BNA)
  source 1..18: mol_type = other DNA
ggtaagttctgtccaagc

SEQ ID NO: 11093 - DNA, 18 bp, synthetic construct
  misc_feature 1..18: note = Description of Artificial Sequence: Synthetic Antisense oligonucleotide
  modified_base 13..14: mod_base = OTHER; note = bicyclic nucleic acid (BNA)
  source 1..18: mol_type = other DNA
ggtaagttctgtccaagc

SEQ ID NO: 11094 - DNA, 18 bp, synthetic construct
  misc_feature 1..18: note = Description of Artificial Sequence: Synthetic Antisense oligonucleotide
  modified_base 2: mod_base = OTHER; note = bicyclic nucleic acid (BNA)
  modified_base 17: mod_base = OTHER; note = bicyclic nucleic acid (BNA)
  source 1..18: mol_type = other DNA
ggtaagttctgtccaagc

SEQ ID NO: 11095 - DNA, 18 bp, synthetic construct
  misc_feature 1..18: note = Description of Artificial Sequence: Synthetic Antisense oligonucleotide
  modified_base 6: mod_base = OTHER; note = bicyclic nucleic acid (BNA)
  modified_base 13: mod_base = OTHER; note = bicyclic nucleic acid (BNA)
  source 1..18: mol_type = other DNA
ggtaagttctgtccaagc

SEQ ID NO: 11096 - DNA, 18 bp, synthetic construct
  misc_feature 1..18: note = Description of Artificial Sequence: Synthetic Antisense oligonucleotide
  modified_base 9: mod_base = OTHER; note = bicyclic nucleic acid (BNA)
  modified_base 11: mod_base = OTHER; note = bicyclic nucleic acid (BNA)
  source 1..18: mol_type = other DNA
ggtaagttctgtccaagc

SEQ ID NO: 11097 - DNA, 18 bp, synthetic construct
  misc_feature 1..18: note = Description of Artificial Sequence: Synthetic Antisense oligonucleotide
  modified_base 14: mod_base = OTHER; note = bicyclic nucleic acid (BNA)
  modified_base 17: mod_base = OTHER; note = bicyclic nucleic acid (BNA)
  source 1..18: mol_type = other DNA
ggtaagttctgtccaagc

SEQ ID NO: 11098 - DNA, 18 bp, synthetic construct
  misc_feature 1..18: note = Description of Artificial Sequence: Synthetic Antisense oligonucleotide
  modified_base 11: mod_base = OTHER; note = bicyclic nucleic acid (BNA)
  modified_base 13: mod_base = OTHER; note = bicyclic nucleic acid (BNA)
  source 1..18: mol_type = other DNA
ggtaagttctgtccaagc

SEQ ID NO: 11099 - DNA, 18 bp, synthetic construct
  misc_feature 1..18: note = Description of Artificial Sequence: Synthetic Antisense oligonucleotide
  modified_base 2: mod_base = OTHER; note = bicyclic nucleic acid (BNA)
  modified_base 6: mod_base = OTHER; note = bicyclic nucleic acid (BNA)
  source 1..18: mol_type = other DNA
ggtaagttctgtccaagc

SEQ ID NO: 11100 - DNA, 18 bp, synthetic construct
  misc_feature 1..18: note = Description of Artificial Sequence: Synthetic Antisense oligonucleotide
  modified_base 2: mod_base = OTHER; note = bicyclic nucleic acid (BNA)
  modified_base 11: mod_base = OTHER; note = bicyclic nucleic acid (BNA)
  source 1..18: mol_type = other DNA
ggtaagttctgtccaagc

SEQ ID NO: 11101 - DNA, 18 bp, synthetic construct
  misc_feature 1..18: note = Description of Artificial Sequence: Synthetic Antisense oligonucleotide
  modified_base 9: mod_base = OTHER; note = bicyclic nucleic acid (BNA)
  modified_base 17: mod_base = OTHER; note = bicyclic nucleic acid (BNA)
  source 1..18: mol_type = other DNA
ggtaagttctgtccaagc

SEQ ID NO: 11102 - DNA, 18 bp, synthetic construct
  misc_feature 1..18: note = Description of Artificial Sequence: Synthetic Antisense oligonucleotide
  modified_base 2: mod_base = OTHER; note = bicyclic nucleic acid (BNA)
  modified_base 14: mod_base = OTHER; note = bicyclic nucleic acid (BNA)
  source 1..18: mol_type = other DNA
ggtaagttctgtccaagc

SEQ ID NO: 11103 - DNA, 18 bp, synthetic construct
  misc_feature 1..18: note = Description of Artificial Sequence: Synthetic Antisense oligonucleotide
  modified_base 11: mod_base = OTHER; note = bicyclic nucleic acid (BNA)
  modified_base 14: mod_base = OTHER; note = bicyclic nucleic acid (BNA)
  source 1..18: mol_type = other DNA
ggtaagttctgtccaagc

SEQ ID NO: 11104 - DNA, 18 bp, synthetic construct
  misc_feature 1..18: note = Description of Artificial Sequence: Synthetic Antisense oligonucleotide
  modified_base 6: mod_base = OTHER; note = bicyclic nucleic acid (BNA)
  modified_base 11: mod_base = OTHER; note = bicyclic nucleic acid (BNA)
  source 1..18: mol_type = other DNA
ggtaagttctgtccaagc

SEQ ID NO: 11105 - DNA, 18 bp, synthetic construct
  misc_feature 1..18: note = Description of Artificial Sequence: Synthetic Antisense oligonucleotide
  modified_base 2: mod_base = OTHER; note = bicyclic nucleic acid (BNA)
  modified_base 13: mod_base = OTHER; note = bicyclic nucleic acid (BNA)
  source 1..18: mol_type = other DNA
ggtaagttctgtccaagc

SEQ ID NO: 11106 - DNA, 18 bp, synthetic construct
  misc_feature 1..18: note = Description of Artificial Sequence: Synthetic Antisense oligonucleotide
  modified_base 9: mod_base = OTHER; note = bicyclic nucleic acid (BNA)
  modified_base 13: mod_base = OTHER; note = bicyclic nucleic acid (BNA)
  source 1..18: mol_type = other DNA
ggtaagttctgtccaagc

SEQ ID NO: 11107 - DNA, 18 bp, synthetic construct
  misc_feature 1..18: note = Description of Artificial Sequence: Synthetic Antisense oligonucleotide
  modified_base 6: mod_base = OTHER; note = bicyclic nucleic acid (BNA)
  modified_base 17: mod_base = OTHER; note = bicyclic nucleic acid (BNA)
  source 1..18: mol_type = other DNA
ggtaagttctgtccaagc

SEQ ID NO: 11108 - DNA, 18 bp, synthetic construct
  misc_feature 1..18: note = Description of Artificial Sequence: Synthetic Antisense oligonucleotide
  modified_base 11: mod_base = OTHER; note = bicyclic nucleic acid (BNA)
  modified_base 17: mod_base = OTHER; note = bicyclic nucleic acid (BNA)
  source 1..18: mol_type = other DNA
ggtaagttctgtccaagc

SEQ ID NO: 11109 - DNA, 18 bp, synthetic construct
  misc_feature 1..18: note = Description of Artificial Sequence: Synthetic Antisense oligonucleotide
  modified_base 2: mod_base = OTHER; note = bicyclic nucleic acid (BNA)
  modified_base 9: mod_base = OTHER; note = bicyclic nucleic acid (BNA)
  source 1..18: mol_type = other DNA
ggtaagttctgtccaagc

SEQ ID NO: 11110 - DNA, 18 bp, synthetic construct
  misc_feature 1..18: note = Description of Artificial Sequence: Synthetic Antisense oligonucleotide
  modified_base 12: mod_base = OTHER; note = bicyclic nucleic acid (BNA)
  modified_base 17: mod_base = OTHER; note = bicyclic nucleic acid (BNA)
  source 1..18: mol_type = other DNA
gtaagttctgtccaagcc

SEQ ID NO: 11111 - DNA, 18 bp, synthetic construct
  misc_feature 1..18: note = Description of Artificial Sequence: Synthetic Antisense oligonucleotide
  modified_base 5: mod_base = OTHER; note = bicyclic nucleic acid (BNA)
  modified_base 8: mod_base = OTHER; note = bicyclic nucleic acid (BNA)
  source 1..18: mol_type = other DNA
gtaagttctgtccaagcc

SEQ ID NO: 11112 - DNA, 18 bp, synthetic construct
  misc_feature 1..18: note = Description of Artificial Sequence: Synthetic Antisense oligonucleotide
  modified_base 8: mod_base = OTHER; note = bicyclic nucleic acid (BNA)
  modified_base 13: mod_base = OTHER; note = bicyclic nucleic acid (BNA)
  source 1..18: mol_type = other DNA
gtaagttctgtccaagcc

SEQ ID NO: 11113 - DNA, 18 bp, synthetic construct
  misc_feature 1..18: note = Description of Artificial Sequence: Synthetic Antisense oligonucleotide
  modified_base 5: mod_base = OTHER; note = bicyclic nucleic acid (BNA)
  modified_base 13: mod_base = OTHER; note = bicyclic nucleic acid (BNA)
  source 1..18: mol_type = other DNA
gtaagttctgtccaagcc

SEQ ID NO: 11114 - DNA, 18 bp, synthetic construct
  misc_feature 1..18: note = Description of Artificial Sequence: Synthetic Antisense oligonucleotide
  modified_base 8: mod_base = OTHER; note = bicyclic nucleic acid (BNA)
  modified_base 17: mod_base = OTHER; note = bicyclic nucleic acid (BNA)
  source 1..18: mol_type = other DNA
gtaagttctgtccaagcc

SEQ ID NO: 11115 - DNA, 18 bp, synthetic construct
  misc_feature 1..18: note = Description of Artificial Sequence: Synthetic Antisense oligonucleotide
  modified_base 13: mod_base = OTHER; note = bicyclic nucleic acid (BNA)
  modified_base 17: mod_base = OTHER; note = bicyclic nucleic acid (BNA)
  source 1..18: mol_type = other DNA
gtaagttctgtccaagcc

SEQ ID NO: 11116 - DNA, 18 bp, synthetic construct
  misc_feature 1..18: note = Description of Artificial Sequence: Synthetic Antisense oligonucleotide
  modified_base 8: mod_base = OTHER; note = bicyclic nucleic acid (BNA)
  modified_base 12: mod_base = OTHER; note = bicyclic nucleic acid (BNA)
  source 1..18: mol_type = other DNA
gtaagttctgtccaagcc

SEQ ID NO: 11117 - DNA, 18 bp, synthetic construct
  misc_feature 1..18: note = Description of Artificial Sequence: Synthetic Antisense oligonucleotide
  modified_base 5: mod_base = OTHER; note = bicyclic nucleic acid (BNA)
  modified_base 10: mod_base = OTHER; note = bicyclic nucleic acid (BNA)
  source 1..18: mol_type = other DNA
gtaagttctgtccaagcc

SEQ ID NO: 11118 - DNA, 18 bp, synthetic construct
  misc_feature 1..18: note = Description of Artificial Sequence: Synthetic Antisense oligonucleotide
  modified_base 8: mod_base = OTHER; note = bicyclic nucleic acid (BNA)
  modified_base 16: mod_base = OTHER; note = bicyclic nucleic acid (BNA)
  source 1..18: mol_type = other DNA
gtaagttctgtccaagcc

SEQ ID NO: 11119 - DNA, 18 bp, synthetic construct
  misc_feature 1..18: note = Description of Artificial Sequence: Synthetic Antisense oligonucleotide
  modified_base 10: mod_base = OTHER; note = bicyclic nucleic acid (BNA)
  modified_base 16: mod_base = OTHER; note = bicyclic nucleic acid (BNA)
  source 1..18: mol_type = other DNA
gtaagttctgtccaagcc

SEQ ID NO: 11120 - DNA, 18 bp, synthetic construct
  misc_feature 1..18: note = Description of Artificial Sequence: Synthetic Antisense oligonucleotide
  modified_base 10: mod_base = OTHER; note = bicyclic nucleic acid (BNA)
  modified_base 12: mod_base = OTHER; note = bicyclic nucleic acid (BNA)
  source 1..18: mol_type = other DNA
gtaagttctgtccaagcc

SEQ ID NO: 11121 - DNA, 18 bp, synthetic construct
  misc_feature 1..18: note = Description of Artificial Sequence: Synthetic Antisense oligonucleotide
  modified_base 5: mod_base = OTHER; note = bicyclic nucleic acid (BNA)
  modified_base 17: mod_base = OTHER; note = bicyclic nucleic acid (BNA)
  source 1..18: mol_type = other DNA
gtaagttctgtccaagcc

SEQ ID NO: 11122 - DNA, 18 bp, synthetic construct
  misc_feature 1..18: note = Description of Artificial Sequence: Synthetic Antisense oligonucleotide
  modified_base 10: mod_base = OTHER; note = bicyclic nucleic acid (BNA)
  modified_base 17: mod_base = OTHER; note = bicyclic nucleic acid (BNA)
  source 1..18: mol_type = other DNA
gtaagttctgtccaagcc

SEQ ID NO: 11123 - DNA, 18 bp, synthetic construct
  misc_feature 1..18: note = Description of Artificial Sequence: Synthetic Antisense oligonucleotide
  modified_base 12..13: mod_base = OTHER; note = bicyclic nucleic acid (BNA)
  source 1..18: mol_type = other DNA
gtaagttctgtccaagcc

SEQ ID NO: 11124 - DNA, 18 bp, synthetic construct
  misc_feature 1..18: note = Description of Artificial Sequence: Synthetic Antisense oligonucleotide
  modified_base 5: mod_base = OTHER; note = bicyclic nucleic acid (BNA)
  modified_base 12: mod_base = OTHER; note = bicyclic nucleic acid (BNA)
  source 1..18: mol_type = other DNA
gtaagttctgtccaagcc

SEQ ID NO: 11125 - DNA, 18 bp, synthetic construct
  misc_feature 1..18: note = Description of Artificial Sequence: Synthetic Antisense oligonucleotide
  modified_base 8: mod_base = OTHER; note = bicyclic nucleic acid (BNA)
  modified_base 10: mod_base = OTHER; note = bicyclic nucleic acid (BNA)
  source 1..18: mol_type = other DNA
gtaagttctgtccaagcc

SEQ ID NO: 11126 - DNA, 18 bp, synthetic construct
  misc_feature 1..18: note = Description of Artificial Sequence: Synthetic Antisense oligonucleotide
  modified_base 13: mod_base = OTHER; note = bicyclic nucleic acid (BNA)
  modified_base 16: mod_base = OTHER; note = bicyclic nucleic acid (BNA)
  source 1..18: mol_type = other DNA
gtaagttctgtccaagcc

SEQ ID NO: 11127 - DNA, 18 bp, synthetic construct
  misc_feature 1..18: note = Description of Artificial Sequence: Synthetic Antisense oligonucleotide
  modified_base 5: mod_base = OTHER; note = bicyclic nucleic acid (BNA)
  modified_base 16: mod_base = OTHER; note = bicyclic nucleic acid (BNA)
  source 1..18: mol_type = other DNA
gtaagttctgtccaagcc

SEQ ID NO: 11128 - DNA, 18 bp, synthetic construct
  misc_feature 1..18: note = Description of Artificial Sequence: Synthetic Antisense oligonucleotide
  modified_base 12: mod_base = OTHER; note = bicyclic nucleic acid (BNA)
  modified_base 16: mod_base = OTHER; note = bicyclic nucleic acid (BNA)
  source 1..18: mol_type = other DNA
gtaagttctgtccaagcc

SEQ ID NO: 11129 - DNA, 18 bp, synthetic construct
  misc_feature 1..18: note = Description of Artificial Sequence: Synthetic Antisense oligonucleotide
  modified_base 16..17: mod_base = OTHER; note = bicyclic nucleic acid (BNA)
  source 1..18: mol_type = other DNA
gtaagttctgtccaagcc

SEQ ID NO: 11130 - DNA, 18 bp, synthetic construct
  misc_feature 1..18: note = Description of Artificial Sequence: Synthetic Antisense oligonucleotide
  modified_base 10: mod_base = OTHER; note = bicyclic nucleic acid (BNA)
  modified_base 13: mod_base = OTHER; note = bicyclic nucleic acid (BNA)
  source 1..18: mol_type = other DNA
gtaagttctgtccaagcc

SEQ ID NO: 11131 - DNA, 18 bp, synthetic construct
  misc_feature 1..18: note = Description of Artificial Sequence: Synthetic Antisense oligonucleotide
  modified_base 6: mod_base = OTHER; note = bicyclic nucleic acid (BNA)
  modified_base 10: mod_base = OTHER; note = bicyclic nucleic acid (BNA)
  source 1..18: mol_type = other DNA
agtcggtaagttctgtcc

SEQ ID NO: 11132 - DNA, 18 bp, synthetic construct
  misc_feature 1..18: note = Description of Artificial Sequence: Synthetic Antisense oligonucleotide
  modified_base 2: mod_base = OTHER; note = bicyclic nucleic acid (BNA)
  modified_base 4: mod_base = OTHER; note = bicyclic nucleic acid (BNA)
  source 1..18: mol_type = other DNA
agtcggtaagttctgtcc

SEQ ID NO: 11133 - DNA, 18 bp, synthetic construct
  misc_feature 1..18: note = Description of Artificial Sequence: Synthetic Antisense oligonucleotide
  modified_base 5: mod_base = OTHER; note = bicyclic nucleic acid (BNA)
  modified_base 13: mod_base = OTHER; note = bicyclic nucleic acid (BNA)
  source 1..18: mol_type = other DNA
agtcggtaagttctgtcc

SEQ ID NO: 11134 - DNA, 18 bp, synthetic construct
  misc_feature 1..18: note = Description of Artificial Sequence: Synthetic Antisense oligonucleotide
  modified_base 13: mod_base = OTHER; note = bicyclic nucleic acid (BNA)
  modified_base 17: mod_base = OTHER; note = bicyclic nucleic acid (BNA)
  source 1..18: mol_type = other DNA
agtcggtaagttctgtcc

SEQ ID NO: 11135 - DNA, 18 bp, synthetic construct
  misc_feature 1..18: note = Description of Artificial Sequence: Synthetic Antisense oligonucleotide
  modified_base 4: mod_base = OTHER; note = bicyclic nucleic acid (BNA)
  modified_base 15: mod_base = OTHER; note = bicyclic nucleic acid (BNA)
  source 1..18: mol_type = other DNA
agtcggtaagttctgtcc

SEQ ID NO: 11136 - DNA, 18 bp, synthetic construct
  misc_feature 1..18: note = Description of Artificial Sequence: Synthetic Antisense oligonucleotide
  modified_base 5: mod_base = OTHER; note = bicyclic nucleic acid (BNA)
  modified_base 10: mod_base = OTHER; note = bicyclic nucleic acid (BNA)
  source 1..18: mol_type = other DNA
agtcggtaagttctgtcc

SEQ ID NO: 11137 - DNA, 18 bp, synthetic construct
  misc_feature 1..18: note = Description of Artificial Sequence: Synthetic Antisense oligonucleotide
  modified_base 2: mod_base = OTHER; note = bicyclic nucleic acid (BNA)
  modified_base 17: mod_base = OTHER; note = bicyclic nucleic acid (BNA)
  source 1..18: mol_type = other DNA
agtcggtaagttctgtcc

SEQ ID NO: 11138 - DNA, 18 bp, synthetic construct
  misc_feature 1..18: note = Description of Artificial Sequence: Synthetic Antisense oligonucleotide
  modified_base 6: mod_base = OTHER; note = bicyclic nucleic acid (BNA)
  modified_base 13: mod_base = OTHER; note = bicyclic nucleic acid (BNA)
  source 1..18: mol_type = other DNA
agtcggtaagttctgtcc

SEQ ID NO: 11139 - DNA, 18 bp, synthetic construct
  misc_feature 1..18: note = Description of Artificial Sequence: Synthetic Antisense oligonucleotide
  modified_base 2: mod_base = OTHER; note = bicyclic nucleic acid (BNA)
  modified_base 15: mod_base = OTHER; note = bicyclic nucleic acid (BNA)
  source 1..18: mol_type = other DNA
agtcggtaagttctgtcc

SEQ ID NO: 11140 - DNA, 18 bp, synthetic construct
  misc_feature 1..18: note = Description of Artificial Sequence: Synthetic Antisense oligonucleotide
  modified_base 2: mod_base = OTHER; note = bicyclic nucleic acid (BNA)
  modified_base 6: mod_base = OTHER; note = bicyclic nucleic acid (BNA)
  source 1..18: mol_type = other DNA
agtcggtaagttctgtcc

SEQ ID NO: 11141 - DNA, 18 bp, synthetic construct
  misc_feature 1..18: note = Description of Artificial Sequence: Synthetic Antisense oligonucleotide
  modified_base 4: mod_base = OTHER; note = bicyclic nucleic acid (BNA)
  modified_base 17: mod_base = OTHER; note = bicyclic nucleic acid (BNA)
  source 1..18: mol_type = other DNA
agtcggtaagttctgtcc

SEQ ID NO: 11142 - DNA, 18 bp, synthetic construct
  misc_feature 1..18: note = Description of Artificial Sequence: Synthetic Antisense oligonucleotide
  modified_base 10: mod_base = OTHER; note = bicyclic nucleic acid (BNA)
  modified_base 15: mod_base = OTHER; note = bicyclic nucleic acid (BNA)
  source 1..18: mol_type = other DNA
agtcggtaagttctgtcc

SEQ ID NO: 11143 - DNA, 18 bp, synthetic construct
  misc_feature 1..18: note = Description of Artificial Sequence: Synthetic Antisense oligonucleotide
  modified_base 13: mod_base = OTHER; note = bicyclic nucleic acid (BNA)
  modified_base 15: mod_base = OTHER; note = bicyclic nucleic acid (BNA)
  source 1..18: mol_type = other DNA
agtcggtaagttctgtcc

SEQ ID NO: 11144 - DNA, 18 bp, synthetic construct
  misc_feature 1..18: note = Description of Artificial Sequence: Synthetic Antisense oligonucleotide
  modified_base 5..6: mod_base = OTHER; note = bicyclic nucleic acid (BNA)
  source 1..18: mol_type = other DNA
agtcggtaagttctgtcc

SEQ ID NO: 11145 - DNA, 18 bp, synthetic construct
  misc_feature 1..18: note = Description of Artificial Sequence: Synthetic Antisense oligonucleotide
  modified_base 5: mod_base = OTHER; note = bicyclic nucleic acid (BNA)
  modified_base 15: mod_base = OTHER; note = bicyclic nucleic acid (BNA)
  source 1..18: mol_type = other DNA
agtcggtaagttctgtcc

SEQ ID NO: 11146 - DNA, 18 bp, synthetic construct
  misc_feature 1..18: note = Description of Artificial Sequence: Synthetic Antisense oligonucleotide
  modified_base 2: mod_base = OTHER; note = bicyclic nucleic acid (BNA)
  modified_base 5: mod_base = OTHER; note = bicyclic nucleic acid (BNA)
  source 1..18: mol_type = other DNA
agtcggtaagttctgtcc

SEQ ID NO: 11147 - DNA, 18 bp, synthetic construct
  misc_feature 1..18: note = Description of Artificial Sequence: Synthetic Antisense oligonucleotide
  modified_base 5: mod_base = OTHER; note = bicyclic nucleic acid (BNA)
  modified_base 17: mod_base = OTHER; note = bicyclic nucleic acid (BNA)
  source 1..18: mol_type = other DNA
agtcggtaagttctgtcc

SEQ ID NO: 11148 - DNA, 18 bp, synthetic construct
  misc_feature 1..18: note = Description of Artificial Sequence: Synthetic Antisense oligonucleotide
  modified_base 10: mod_base = OTHER; note = bicyclic nucleic acid (BNA)
  modified_base 17: mod_base = OTHER; note = bicyclic nucleic acid (BNA)
  source 1..18: mol_type = other DNA
agtcggtaagttctgtcc

SEQ ID NO: 11149 - DNA, 18 bp, synthetic construct
  misc_feature 1..18: note = Description of Artificial Sequence: Synthetic Antisense oligonucleotide
  modified_base 4: mod_base = OTHER; note = bicyclic nucleic acid (BNA)
  modified_base 10: mod_base = OTHER; note = bicyclic nucleic acid (BNA)
  source 1..18: mol_type = other DNA
agtcggtaagttctgtcc

SEQ ID NO: 11150 - DNA, 18 bp, synthetic construct
  misc_feature 1..18: note = Description of Artificial Sequence: Synthetic Antisense oligonucleotide
  modified_base 2: mod_base = OTHER; note = bicyclic nucleic acid (BNA)
  modified_base 10: mod_base = OTHER; note = bicyclic nucleic acid (BNA)
  source 1..18: mol_type = other DNA
agtcggtaagttctgtcc

SEQ ID NO: 11151 - DNA, 18 bp, synthetic construct
  misc_feature 1..18: note = Description of Artificial Sequence: Synthetic Antisense oligonucleotide
  modified_base 4: mod_base = OTHER; note = bicyclic nucleic acid (BNA)
  modified_base 6: mod_base = OTHER; note = bicyclic nucleic acid (BNA)
  source 1..18: mol_type = other DNA
agtcggtaagttctgtcc

SEQ ID NO: 11152 - DNA, 18 bp, synthetic construct
  misc_feature 1..18: note = Description of Artificial Sequence: Synthetic Antisense oligonucleotide
  modified_base 4: mod_base = OTHER; note = bicyclic nucleic acid (BNA)
  modified_base 13: mod_base = OTHER; note = bicyclic nucleic acid (BNA)
  source 1..18: mol_type = other DNA
agtcggtaagttctgtcc

SEQ ID NO: 11153 - DNA, 18 bp, synthetic construct
  misc_feature 1..18: note = Description of Artificial Sequence: Synthetic Antisense oligonucleotide
  modified_base 15: mod_base = OTHER; note = bicyclic nucleic acid (BNA)
  modified_base 17: mod_base = OTHER; note = bicyclic nucleic acid (BNA)
  source 1..18: mol_type = other DNA
agtcggtaagttctgtcc

SEQ ID NO: 11154 - DNA, 18 bp, synthetic construct
  misc_feature 1..18: note = Description of Artificial Sequence: Synthetic Antisense oligonucleotide
  modified_base 2: mod_base = OTHER; note = bicyclic nucleic acid (BNA)
  modified_base 13: mod_base = OTHER; note = bicyclic nucleic acid (BNA)
  source 1..18: mol_type = other DNA
agtcggtaagttctgtcc

SEQ ID NO: 11155 - DNA, 18 bp, synthetic construct
  misc_feature 1..18: note = Description of Artificial Sequence: Synthetic Antisense oligonucleotide
  modified_base 6: mod_base = OTHER; note = bicyclic nucleic acid (BNA)
  modified_base 17: mod_base = OTHER; note = bicyclic nucleic acid (BNA)
  source 1..18: mol_type = other DNA
agtcggtaagttctgtcc

SEQ ID NO: 11156 - DNA, 18 bp, synthetic construct
  misc_feature 1..18: note = Description of Artificial Sequence: Synthetic Antisense oligonucleotide
  modified_base 6: mod_base = OTHER; note = bicyclic nucleic acid (BNA)
  modified_base 15: mod_base = OTHER; note = bicyclic nucleic acid (BNA)
  source 1..18: mol_type = other DNA
agtcggtaagttctgtcc

SEQ ID NO: 11157 - DNA, 18 bp, synthetic construct
  misc_feature 1..18: note = Description of Artificial Sequence: Synthetic Antisense oligonucleotide
  modified_base 4..5: mod_base = OTHER; note = bicyclic nucleic acid (BNA)
  source 1..18: mol_type = other DNA
agtcggtaagttctgtcc

SEQ ID NO: 11158 - DNA, 18 bp, synthetic construct
  misc_feature 1..18: note = Description of Artificial Sequence: Synthetic Antisense oligonucleotide
  modified_base 10: mod_base = OTHER; note = bicyclic nucleic acid (BNA)
  modified_base 13: mod_base = OTHER; note = bicyclic nucleic acid (BNA)
  source 1..18: mol_type = other DNA
agtcggtaagttctgtcc

SEQ ID NO: 11159 - DNA, 18 bp, synthetic construct
  misc_feature 1..18: note = Description of Artificial Sequence: Synthetic Antisense oligonucleotide
  modified_base 12: mod_base = OTHER; note = bicyclic nucleic acid (BNA)
  modified_base 17: mod_base = OTHER; note = bicyclic nucleic acid (BNA)
  source 1..18: mol_type = other DNA
ctgtccaagcccggttga

SEQ ID NO: 11160 - DNA, 18 bp, synthetic construct
  misc_feature 1..18: note = Description of Artificial Sequence: Synthetic Antisense oligonucleotide
  modified_base 6: mod_base = OTHER; note = bicyclic nucleic acid (BNA)
  modified_base 10: mod_base = OTHER; note = bicyclic nucleic acid (BNA)
  source 1..18: mol_type = other DNA
ctgtccaagcccggttga

SEQ ID NO: 11161 - DNA, 18 bp, synthetic construct
  misc_feature 1..18: note = Description of Artificial Sequence: Synthetic Antisense oligonucleotide
  modified_base 9: mod_base = OTHER; note = bicyclic nucleic acid (BNA)
  modified_base 14: mod_base = OTHER; note = bicyclic nucleic acid (BNA)
  source 1..18: mol_type = other DNA
ctgtccaagcccggttga

SEQ ID NO: 11162 - DNA, 18 bp, synthetic construct
  misc_feature 1..18: note = Description of Artificial Sequence: Synthetic Antisense oligonucleotide
  modified_base 11..12: mod_base = OTHER; note = bicyclic nucleic acid (BNA)
  source 1..18: mol_type = other DNA
ctgtccaagcccggttga

SEQ ID NO: 11163 - DNA, 18 bp, synthetic construct
  misc_feature 1..18: note = Description of Artificial Sequence: Synthetic Antisense oligonucleotide
  modified_base 5: mod_base = OTHER; note = bicyclic nucleic acid (BNA)
  modified_base 9: mod_base = OTHER; note = bicyclic nucleic acid (BNA)
  source 1..18: mol_type = other DNA
ctgtccaagcccggttga

SEQ ID NO: 11164 - DNA, 18 bp, synthetic construct
  misc_feature 1..18: note = Description of Artificial Sequence: Synthetic Antisense oligonucleotide
  modified_base 3: mod_base = OTHER; note = bicyclic nucleic acid (BNA)
  modified_base 9: mod_base = OTHER; note = bicyclic nucleic acid (BNA)
  source 1..18: mol_type = other DNA
ctgtccaagcccggttga

SEQ ID NO: 11165 - DNA, 18 bp, synthetic construct
  misc_feature 1..18: note = Description of Artificial Sequence: Synthetic Antisense oligonucleotide
  modified_base 6: mod_base = OTHER; note = bicyclic nucleic acid (BNA)
  modified_base 14: mod_base = OTHER; note = bicyclic nucleic acid (BNA)
  source 1..18: mol_type = other DNA
ctgtccaagcccggttga

SEQ ID NO: 11166 - DNA, 18 bp, synthetic construct
  misc_feature 1..18: note = Description of Artificial Sequence: Synthetic Antisense oligonucleotide
  modified_base 9..10: mod_base = OTHER; note = bicyclic nucleic acid (BNA)
  source 1..18: mol_type = other DNA
ctgtccaagcccggttga

SEQ ID NO: 11167 - DNA, 18 bp, synthetic construct
  misc_feature 1..18: note = Description of Artificial Sequence: Synthetic Antisense oligonucleotide
  modified_base 5: mod_base = OTHER; note = bicyclic nucleic acid (BNA)
  modified_base 13: mod_base = OTHER; note = bicyclic nucleic acid (BNA)
  source 1..18: mol_type = other DNA
ctgtccaagcccggttga

SEQ ID NO: 11168 - DNA, 18 bp, synthetic construct
  misc_feature 1..18: note = Description of Artificial Sequence: Synthetic Antisense oligonucleotide
  modified_base 3: mod_base = OTHER; note = bicyclic nucleic acid (BNA)
  modified_base 13: mod_base = OTHER; note = bicyclic nucleic acid (BNA)
  source 1..18: mol_type = other DNA
ctgtccaagcccggttga

SEQ ID NO: 11169 - DNA, 18 bp, synthetic construct
  misc_feature 1..18: note = Description of Artificial Sequence: Synthetic Antisense oligonucleotide
  modified_base 13: mod_base = OTHER; note = bicyclic nucleic acid (BNA)
  modified_base 17: mod_base = OTHER; note = bicyclic nucleic acid (BNA)
  source 1..18: mol_type = other DNA
ctgtccaagcccggttga

SEQ ID NO: 11170 - DNA, 18 bp, synthetic construct
  misc_feature 1..18: note = Description of Artificial Sequence: Synthetic Antisense oligonucleotide
  modified_base 3: mod_base = OTHER; note = bicyclic nucleic acid (BNA)
  modified_base 6: mod_base = OTHER; note = bicyclic nucleic acid (BNA)
  source 1..18: mol_type = other DNA
ctgtccaagcccggttga

SEQ ID NO: 11171 - DNA, 18 bp, synthetic construct
  misc_feature 1..18: note = Description of Artificial Sequence: Synthetic Antisense oligonucleotide
  modified_base 6: mod_base = OTHER; note = bicyclic nucleic acid (BNA)
  modified_base 9: mod_base = OTHER; note = bicyclic nucleic acid (BNA)
  source 1..18: mol_type = other DNA
ctgtccaagcccggttga

SEQ ID NO: 11172 - DNA, 18 bp, synthetic construct
  misc_feature 1..18: note = Description of Artificial Sequence: Synthetic Antisense oligonucleotide
  modified_base 5: mod_base = OTHER; note = bicyclic nucleic acid (BNA)
  modified_base 10: mod_base = OTHER; note = bicyclic nucleic acid (BNA)
  source 1..18: mol_type = other DNA
ctgtccaagcccggttga

SEQ ID NO: 11173 - DNA, 18 bp, synthetic construct
  misc_feature 1..18: note = Description of Artificial Sequence: Synthetic Antisense oligonucleotide
  modified_base 3: mod_base = OTHER; note = bicyclic nucleic acid (BNA)
  modified_base 10: mod_base = OTHER; note = bicyclic nucleic acid (BNA)
  source 1..18: mol_type = other DNA
ctgtccaagcccggttga

SEQ ID NO: 11174 - DNA, 18 bp, synthetic construct
  misc_feature 1..18: note = Description of Artificial Sequence: Synthetic Antisense oligonucleotide
  modified_base 13..14: mod_base = OTHER; note = bicyclic nucleic acid (BNA)
  source 1..18: mol_type = other DNA
ctgtccaagcccggttga

SEQ ID NO: 11175 - DNA, 18 bp, synthetic construct
  misc_feature 1..18: note = Description of Artificial Sequence: Synthetic Antisense oligonucleotide
  modified_base 6: mod_base = OTHER; note = bicyclic nucleic acid (BNA)
  modified_base 13: mod_base = OTHER; note = bicyclic nucleic acid (BNA)
  source 1..18: mol_type = other DNA
ctgtccaagcccggttga

SEQ ID NO: 11176 - DNA, 18 bp, synthetic construct
  misc_feature 1..18: note = Description of Artificial Sequence: Synthetic Antisense oligonucleotide
  modified_base 9: mod_base = OTHER; note = bicyclic nucleic acid (BNA)
  modified_base 11: mod_base = OTHER; note = bicyclic nucleic acid (BNA)
  source 1..18: mol_type = other DNA
ctgtccaagcccggttga

SEQ ID NO: 11177 - DNA, 18 bp, synthetic construct
  misc_feature 1..18: note = Description of Artificial Sequence: Synthetic Antisense oligonucleotide
  modified_base 14: mod_base = OTHER; note = bicyclic nucleic acid (BNA)
  modified_base 17: mod_base = OTHER; note = bicyclic nucleic acid (BNA)
  source 1..18: mol_type = other DNA
ctgtccaagcccggttga

SEQ ID NO: 11178 - DNA, 18 bp, synthetic construct
  misc_feature 1..18: note = Description of Artificial Sequence: Synthetic Antisense oligonucleotide
  modified_base 11: mod_base = OTHER; note = bicyclic nucleic acid (BNA)
  modified_base 13: mod_base = OTHER; note = bicyclic nucleic acid (BNA)
  source 1..18: mol_type = other DNA
ctgtccaagcccggttga

SEQ ID NO: 11179 - DNA, 18 bp, synthetic construct
  misc_feature 1..18: note = Description of Artificial Sequence: Synthetic Antisense oligonucleotide
  modified_base 5: mod_base = OTHER; note = bicyclic nucleic acid (BNA)
  modified_base 14: mod_base = OTHER; note = bicyclic nucleic acid (BNA)
  source 1..18: mol_type = other DNA
ctgtccaagcccggttga

SEQ ID NO: 11180 - DNA, 18 bp, synthetic construct
  misc_feature 1..18: note = Description of Artificial Sequence: Synthetic Antisense oligonucleotide
  modified_base 3: mod_base = OTHER; note = bicyclic nucleic acid (BNA)
  modified_base 14: mod_base = OTHER; note = bicyclic nucleic acid (BNA)
  source 1..18: mol_type = other DNA
ctgtccaagcccggttga

SEQ ID NO: 11181 - DNA, 18 bp, synthetic construct
  misc_feature 1..18: note = Description of Artificial Sequence: Synthetic Antisense oligonucleotide
  modified_base 10: mod_base = OTHER; note = bicyclic nucleic acid (BNA)
  modified_base 12: mod_base = OTHER; note = bicyclic nucleic acid (BNA)
  source 1..18: mol_type = other DNA
ctgtccaagcccggttga

SEQ ID NO: 11182 - DNA, 18 bp, synthetic construct
  misc_feature 1..18: note = Description of Artificial Sequence: Synthetic Antisense oligonucleotide
  modified_base 9: mod_base = OTHER; note = bicyclic nucleic acid (BNA)
  modified_base 17: mod_base = OTHER; note = bicyclic nucleic acid (BNA)
  source 1..18: mol_type = other DNA
ctgtccaagcccggttga

SEQ ID NO: 11183 - DNA, 18 bp, synthetic construct
  misc_feature 1..18: note = Description of Artificial Sequence: Synthetic Antisense oligonucleotide
  modified_base 12: mod_base = OTHER; note = bicyclic nucleic acid (BNA)
  modified_base 14: mod_base = OTHER; note = bicyclic nucleic acid (BNA)
  source 1..18: mol_type = other DNA
ctgtccaagcccggttga

SEQ ID NO: 11184 - DNA, 18 bp, synthetic construct
  misc_feature 1..18: note = Description of Artificial Sequence: Synthetic Antisense oligonucleotide
  modified_base 5: mod_base = OTHER; note = bicyclic nucleic acid (BNA)
  modified_base 11: mod_base = OTHER; note = bicyclic nucleic acid (BNA)
  source 1..18: mol_type = other DNA
ctgtccaagcccggttga

SEQ ID NO: 11185 - DNA, 18 bp, synthetic construct
  misc_feature 1..18: note = Description of Artificial Sequence: Synthetic Antisense oligonucleotide
  modified_base 3: mod_base = OTHER; note = bicyclic nucleic acid (BNA)
  modified_base 17: mod_base = OTHER; note = bicyclic nucleic acid (BNA)
  source 1..18: mol_type = other DNA
ctgtccaagcccggttga

SEQ ID NO: 11186 - DNA, 18 bp, synthetic construct
  misc_feature 1..18: note = Description of Artificial Sequence: Synthetic Antisense oligonucleotide
  modified_base 6: mod_base = OTHER; note = bicyclic nucleic acid (BNA)
  modified_base 12: mod_base = OTHER; note = bicyclic nucleic acid (BNA)
  source 1..18: mol_type = other DNA
ctgtccaagcccggttga

SEQ ID NO: 11187 - DNA, 18 bp, synthetic construct
  misc_feature 1..18: note = Description of Artificial Sequence: Synthetic Antisense oligonucleotide
  modified_base 5..6: mod_base = OTHER; note = bicyclic nucleic acid (BNA)
  source 1..18: mol_type = other DNA
ctgtccaagcccggttga

SEQ ID NO: 11188 - DNA, 18 bp, synthetic construct
  misc_feature 1..18: note = Description of Artificial Sequence: Synthetic Antisense oligonucleotide
  modified_base 11: mod_base = OTHER; note = bicyclic nucleic acid (BNA)
  modified_base 14: mod_base = OTHER; note = bicyclic nucleic acid (BNA)
  source 1..18: mol_type = other DNA
ctgtccaagcccggttga

SEQ ID NO: 11189 - DNA, 18 bp, synthetic construct
  misc_feature 1..18: note = Description of Artificial Sequence: Synthetic Antisense oligonucleotide
  modified_base 9: mod_base = OTHER; note = bicyclic nucleic acid (BNA)
  modified_base 12: mod_base = OTHER; note = bicyclic nucleic acid (BNA)
  source 1..18: mol_type = other DNA
ctgtccaagcccggttga

SEQ ID NO: 11190 - DNA, 18 bp, synthetic construct
  misc_feature 1..18: note = Description of Artificial Sequence: Synthetic Antisense oligonucleotide
  modified_base 5: mod_base = OTHER; note = bicyclic nucleic acid (BNA)
  modified_base 17: mod_base = OTHER; note = bicyclic nucleic acid (BNA)
  source 1..18: mol_type = other DNA
ctgtccaagcccggttga

SEQ ID NO: 11191 - DNA, 18 bp, synthetic construct
  misc_feature 1..18: note = Description of Artificial Sequence: Synthetic Antisense oligonucleotide
  modified_base 3: mod_base = OTHER; note = bicyclic nucleic acid (BNA)
  modified_base 11: mod_base = OTHER; note = bicyclic nucleic acid (BNA)
  source 1..18: mol_type = other DNA
ctgtccaagcccggttga

SEQ ID NO: 11192 - DNA, 18 bp, synthetic construct
  misc_feature 1..18: note = Description of Artificial Sequence: Synthetic Antisense oligonucleotide
  modified_base 10..11: mod_base = OTHER; note = bicyclic nucleic acid (BNA)
  source 1..18: mol_type = other DNA
ctgtccaagcccggttga

SEQ ID NO: 11193 - DNA, 18 bp, synthetic construct
  misc_feature 1..18: note = Description of Artificial Sequence: Synthetic Antisense oligonucleotide
  modified_base 10: mod_base = OTHER; note = bicyclic nucleic acid (BNA)
  modified_base 17: mod_base = OTHER; note = bicyclic nucleic acid (BNA)
  source 1..18: mol_type = other DNA
ctgtccaagcccggttga

SEQ ID NO: 11194 - DNA, 18 bp, synthetic construct
  misc_feature 1..18: note = Description of Artificial Sequence: Synthetic Antisense oligonucleotide
  modified_base 12..13: mod_base = OTHER; note = bicyclic nucleic acid (BNA)
  source 1..18: mol_type = other DNA
ctgtccaagcccggttga

SEQ ID NO: 11195 - DNA, 18 bp, synthetic construct
  misc_feature 1..18: note = Description of Artificial Sequence: Synthetic Antisense oligonucleotide
  modified_base 5: mod_base = OTHER; note = bicyclic nucleic acid (BNA)
  modified_base 12: mod_base = OTHER; note = bicyclic nucleic acid (BNA)
  source 1..18: mol_type = other DNA
ctgtccaagcccggttga

SEQ ID NO: 11196 - DNA, 18 bp, synthetic construct
  misc_feature 1..18: note = Description of Artificial Sequence: Synthetic Antisense oligonucleotide
  modified_base 10: mod_base = OTHER; note = bicyclic nucleic acid (BNA)
  modified_base 14: mod_base = OTHER; note = bicyclic nucleic acid (BNA)
  source 1..18: mol_type = other DNA
ctgtccaagcccggttga

SEQ ID NO: 11197 - DNA, 18 bp, synthetic construct
  misc_feature 1..18: note = Description of Artificial Sequence: Synthetic Antisense oligonucleotide
  modified_base 6: mod_base = OTHER; note = bicyclic nucleic acid (BNA)
  modified_base 11: mod_base = OTHER; note = bicyclic nucleic acid (BNA)
  source 1..18: mol_type = other DNA
ctgtccaagcccggttga

SEQ ID NO: 11198 - DNA, 18 bp, synthetic construct
  misc_feature 1..18: note = Description of Artificial Sequence: Synthetic Antisense oligonucleotide
  modified_base 6: mod_base = OTHER; note = bicyclic nucleic acid (BNA)
  modified_base 17: mod_base = OTHER; note = bicyclic nucleic acid (BNA)
  source 1..18: mol_type = other DNA
ctgtccaagcccggttga

SEQ ID NO: 11199 - DNA, 18 bp, synthetic construct
  misc_feature 1..18: note = Description of Artificial Sequence: Synthetic Antisense oligonucleotide
  modified_base 9: mod_base = OTHER; note = bicyclic nucleic acid (BNA)
  modified_base 13: mod_base = OTHER; note = bicyclic nucleic acid (BNA)
  source 1..18: mol_type = other DNA
ctgtccaagcccggttga

SEQ ID NO: 11200 - DNA, 18 bp, synthetic construct
  misc_feature 1..18: note = Description of Artificial Sequence: Synthetic Antisense oligonucleotide
  modified_base 11: mod_base = OTHER; note = bicyclic nucleic acid (BNA)
  modified_base 17: mod_base = OTHER; note = bicyclic nucleic acid (BNA)
  source 1..18: mol_type = other DNA
ctgtccaagcccggttga

SEQ ID NO: 11201 - DNA, 18 bp, synthetic construct
  misc_feature 1..18: note = Description of Artificial Sequence: Synthetic Antisense oligonucleotide
  modified_base 3: mod_base = OTHER; note = bicyclic nucleic acid (BNA)
  modified_base 12: mod_base = OTHER; note = bicyclic nucleic acid (BNA)
  source 1..18: mol_type = other DNA
ctgtccaagcccggttga

SEQ ID NO: 11202 - DNA, 18 bp, synthetic construct
  misc_feature 1..18: note = Description of Artificial Sequence: Synthetic Antisense oligonucleotide
  modified_base 3: mod_base = OTHER; note = bicyclic nucleic acid (BNA)
  modified_base 5: mod_base = OTHER; note = bicyclic nucleic acid (BNA)
  source 1..18: mol_type = other DNA
ctgtccaagcccggttga

SEQ ID NO: 11203 - DNA, 18 bp, synthetic construct
  misc_feature 1..18: note = Description of Artificial Sequence: Synthetic Antisense oligonucleotide
  modified_base 10: mod_base = OTHER; note = bicyclic nucleic acid (BNA)
  modified_base 13: mod_base = OTHER; note = bicyclic nucleic acid (BNA)
  source 1..18: mol_type = other DNA
ctgtccaagcccggttga

SEQ ID NO: 11204 - DNA, 20 bp, synthetic construct
  misc_feature 1..20: note = Description of Artificial Sequence: Synthetic Antisense oligonucleotide
  modified_base 2: mod_base = OTHER; note = bicyclic nucleic acid (BNA)
  source 1..20: mol_type = other DNA
tcaaggaagatggcatttct

SEQ ID NO: 11205 - DNA, 20 bp, synthetic construct
  misc_feature 1..20: note = Description of Artificial Sequence: Synthetic Antisense oligonucleotide
  modified_base 9: mod_base = OTHER; note = bicyclic nucleic acid (BNA)
  source 1..20: mol_type = other DNA
tcaaggaagatggcatttct

SEQ ID NO: 11206 - DNA, 20 bp, synthetic construct
  misc_feature 1..20: note = Description of Artificial Sequence: Synthetic Antisense oligonucleotide
  modified_base 5: mod_base = OTHER; note = bicyclic nucleic acid (BNA)
  source 1..20: mol_type = other DNA
tcaaggaagatggcatttct

SEQ ID NO: 11207 - DNA, 20 bp, synthetic construct
  misc_feature 1..20: note = Description of Artificial Sequence: Synthetic Antisense oligonucleotide
  modified_base 6: mod_base = OTHER; note = bicyclic nucleic acid (BNA)
  source 1..20: mol_type = other DNA
tcaaggaagatggcatttct

SEQ ID NO: 11208 - DNA, 20 bp, synthetic construct
  misc_feature 1..20: note = Description of Artificial Sequence: Synthetic Antisense oligonucleotide
  modified_base 12: mod_base = OTHER; note = bicyclic nucleic acid (BNA)
  source 1..20: mol_type = other DNA
tcaaggaagatggcatttct

SEQ ID NO: 11209 - DNA, 20 bp, synthetic construct
  misc_feature 1..20: note = Description of Artificial Sequence: Synthetic Antisense oligonucleotide
  modified_base 13: mod_base = OTHER; note = bicyclic nucleic acid (BNA)
  source 1..20: mol_type = other DNA
tcaaggaagatggcatttct

SEQ ID NO: 11210 - DNA, 20 bp, synthetic construct
  misc_feature 1..20: note = Description of Artificial Sequence: Synthetic Antisense oligonucleotide
  modified_base 19: mod_base = OTHER; note = bicyclic nucleic acid (BNA)
  source 1..20: mol_type = other DNA
tcaaggaagatggcatttct

SEQ ID NO: 11211 - DNA, 20 bp, synthetic construct
  misc_feature 1..20: note = Description of Artificial Sequence: Synthetic Antisense oligonucleotide
  modified_base 14: mod_base = OTHER; note = bicyclic nucleic acid (BNA)
  source 1..20: mol_type = other DNA
tcaaggaagatggcatttct

SEQ ID NO: 11212 - DNA, 22 bp, synthetic construct
  misc_feature 1..22: note = Description of Artificial Sequence: Synthetic Antisense oligonucleotide
  modified_base 2: mod_base = OTHER; note = bicyclic nucleic acid (BNA)
  source 1..22: mol_type = other DNA
tcaaggaagatggcatttctag

SEQ ID NO: 11213 - DNA, 22 bp, synthetic construct
  misc_feature 1..22: note = Description of Artificial Sequence: Synthetic Antisense oligonucleotide
  modified_base 9: mod_base = OTHER; note = bicyclic nucleic acid (BNA)
  source 1..22: mol_type = other DNA
tcaaggaagatggcatttctag

SEQ ID NO: 11214 - DNA, 22 bp, synthetic construct
  misc_feature 1..22: note = Description of Artificial Sequence: Synthetic Antisense oligonucleotide
  modified_base 5: mod_base = OTHER; note = bicyclic nucleic acid (BNA)
  source 1..22: mol_type = other DNA
tcaaggaagatggcatttctag

SEQ ID NO: 11215 - DNA, 22 bp, synthetic construct
  misc_feature 1..22: note = Description of Artificial Sequence: Synthetic Antisense oligonucleotide
  modified_base 6: mod_base = OTHER; note = bicyclic nucleic acid (BNA)
  source 1..22: mol_type = other DNA
tcaaggaagatggcatttctag

SEQ ID NO: 11216 - DNA, 22 bp, synthetic construct
  misc_feature 1..22: note = Description of Artificial Sequence: Synthetic Antisense oligonucleotide
  modified_base 12: mod_base = OTHER; note = bicyclic nucleic acid (BNA)
  source 1..22: mol_type = other DNA
tcaaggaagatggcatttctag

SEQ ID NO: 11217 - DNA, 22 bp, synthetic construct
  misc_feature 1..22: note = Description of Artificial Sequence: Synthetic Antisense oligonucleotide
  modified_base 13: mod_base = OTHER; note = bicyclic nucleic acid (BNA)
  source 1..22: mol_type = other DNA
tcaaggaagatggcatttctag

SEQ ID NO: 11218 - DNA, 22 bp, synthetic construct
  misc_feature 1..22: note = Description of Artificial Sequence: Synthetic Antisense oligonucleotide
  modified_base 19: mod_base = OTHER; note = bicyclic nucleic acid (BNA)
  source 1..22: mol_type = other DNA
tcaaggaagatggcatttctag

SEQ ID NO: 11219 - DNA, 22 bp, synthetic construct
  misc_feature 1..22: note = Description of Artificial Sequence: Synthetic Antisense oligonucleotide
  modified_base 14: mod_base = OTHER; note = bicyclic nucleic acid (BNA)
  source 1..22: mol_type = other DNA
tcaaggaagatggcatttctag

SEQ ID NO: 11220 - DNA, 20 bp, synthetic construct
  misc_feature 1..20: note = Description of Artificial Sequence: Synthetic Antisense oligonucleotide
  modified_base 9: mod_base = OTHER; note = bicyclic nucleic acid (BNA)
  modified_base 14: mod_base = OTHER; note = bicyclic nucleic acid (BNA)
  source 1..20: mol_type = other DNA
tcaaggaagatggcatttct

SEQ ID NO: 11221 - DNA, 20 bp, synthetic construct
  misc_feature 1..20: note = Description of Artificial Sequence: Synthetic Antisense oligonucleotide
  modified_base 5: mod_base = OTHER; note = bicyclic nucleic acid (BNA)
  modified_base 9: mod_base = OTHER; note = bicyclic nucleic acid (BNA)
  source 1..20: mol_type = other DNA
tcaaggaagatggcatttct

SEQ ID NO: 11222 - DNA, 20 bp, synthetic construct
  misc_feature 1..20: note = Description of Artificial Sequence: Synthetic Antisense oligonucleotide
  modified_base 5: mod_base = OTHER; note = bicyclic nucleic acid (BNA)
  modified_base 19: mod_base = OTHER; note = bicyclic nucleic acid (BNA)
  source 1..20: mol_type = other DNA
tcaaggaagatggcatttct

SEQ ID NO: 11223 - DNA, 20 bp, synthetic construct
  misc_feature 1..20: note = Description of Artificial Sequence: Synthetic Antisense oligonucleotide
  modified_base 6: mod_base = OTHER; note = bicyclic nucleic acid (BNA)
  modified_base 14: mod_base = OTHER; note = bicyclic nucleic acid (BNA)
  source 1..20: mol_type = other DNA
tcaaggaagatggcatttct

SEQ ID NO: 11224 - DNA, 20 bp, synthetic construct
  misc_feature 1..20: note = Description of Artificial Sequence: Synthetic Antisense oligonucleotide
  modified_base 5: mod_base = OTHER; note = bicyclic nucleic acid (BNA)
  modified_base 13: mod_base = OTHER; note = bicyclic nucleic acid (BNA)
  source 1..20: mol_type = other DNA
tcaaggaagatggcatttct

SEQ ID NO: 11225 - DNA, 20 bp, synthetic construct
  misc_feature 1..20: note = Description of Artificial Sequence: Synthetic Antisense oligonucleotide
  modified_base 2: mod_base = OTHER; note = bicyclic nucleic acid (BNA)
  modified_base 12: mod_base = OTHER; note = bicyclic nucleic acid (BNA)
  source 1..20: mol_type = other DNA
tcaaggaagatggcatttct

SEQ ID NO: 11226 - DNA, 20 bp, synthetic construct
  misc_feature 1..20: note = Description of Artificial Sequence: Synthetic Antisense oligonucleotide
  modified_base 6: mod_base = OTHER; note = bicyclic nucleic acid (BNA)
  modified_base 9: mod_base = OTHER; note = bicyclic nucleic acid (BNA)
  source 1..20: mol_type = other DNA
tcaaggaagatggcatttct

SEQ ID NO: 11227 - DNA, 20 bp, synthetic construct
  misc_feature 1..20: note = Description of Artificial Sequence: Synthetic Antisense oligonucleotide
  modified_base 13..14: mod_base = OTHER; note = bicyclic nucleic acid (BNA)
  source 1..20: mol_type = other DNA
tcaaggaagatggcatttct

SEQ ID NO: 11228 - DNA, 20 bp, synthetic construct
  misc_feature 1..20: note = Description of Artificial Sequence: Synthetic Antisense oligonucleotide
  modified_base 6: mod_base = OTHER; note = bicyclic nucleic acid (BNA)
  modified_base 13: mod_base = OTHER; note = bicyclic nucleic acid (BNA)
  source 1..20: mol_type = other DNA
tcaaggaagatggcatttct

SEQ ID NO: 11229 - DNA, 20 bp, synthetic construct
  misc_feature 1..20: note = Description of Artificial Sequence: Synthetic Antisense oligonucleotide
  modified_base 6: mod_base = OTHER; note = bicyclic nucleic acid (BNA)
  modified_base 19: mod_base = OTHER; note = bicyclic nucleic acid (BNA)
  source 1..20: mol_type = other DNA
tcaaggaagatggcatttct

SEQ ID NO: 11230 - DNA, 20 bp, synthetic construct
  misc_feature 1..20: note = Description of Artificial Sequence: Synthetic Antisense oligonucleotide
  modified_base 5: mod_base = OTHER; note = bicyclic nucleic acid (BNA)
  modified_base 14: mod_base = OTHER; note = bicyclic nucleic acid (BNA)
  source 1..20: mol_type = other DNA
tcaaggaagatggcatttct

SEQ ID NO: 11231 - DNA, 20 bp, synthetic construct
  misc_feature 1..20: note = Description of Artificial Sequence: Synthetic Antisense oligonucleotide
  modified_base 2: mod_base = OTHER; note = bicyclic nucleic acid (BNA)
  modified_base 6: mod_base = OTHER; note = bicyclic nucleic acid (BNA)
  source 1..20: mol_type = other DNA
tcaaggaagatggcatttct

SEQ ID NO: 11232 - DNA, 20 bp, synthetic construct
  misc_feature 1..20: note = Description of Artificial Sequence: Synthetic Antisense oligonucleotide
  modified_base 12: mod_base = OTHER; note = bicyclic nucleic acid (BNA)
  modified_base 19: mod_base = OTHER; note = bicyclic nucleic acid (BNA)
  source 1..20: mol_type = other DNA
tcaaggaagatggcatttct

SEQ ID NO: 11233 - DNA, 20 bp, synthetic construct
  misc_feature 1..20: note = Description of Artificial Sequence: Synthetic Antisense oligonucleotide
  modified_base 12: mod_base = OTHER; note = bicyclic nucleic acid (BNA)
  modified_base 14: mod_base = OTHER; note = bicyclic nucleic acid (BNA)
  source 1..20: mol_type = other DNA
tcaaggaagatggcatttct

SEQ ID NO: 11234 - DNA, 20 bp, synthetic construct
  misc_feature 1..20: note = Description of Artificial Sequence: Synthetic Antisense oligonucleotide
  modified_base 6: mod_base = OTHER; note = bicyclic nucleic acid (BNA)
  modified_base 12: mod_base = OTHER; note = bicyclic nucleic acid (BNA)
  source 1..20: mol_type = other DNA
tcaaggaagatggcatttct

SEQ ID NO: 11235 - DNA, 20 bp, synthetic construct
  misc_feature 1..20: note = Description of Artificial Sequence: Synthetic Antisense oligonucleotide
  modified_base 5..6: mod_base = OTHER; note = bicyclic nucleic acid (BNA)
  source 1..20: mol_type = other DNA
tcaaggaagatggcatttct

SEQ ID NO: 11236 - DNA, 20 bp, synthetic construct
  misc_feature 1..20: note = Description of Artificial Sequence: Synthetic Antisense oligonucleotide
  modified_base 2: mod_base = OTHER; note = bicyclic nucleic acid (BNA)
  modified_base 14: mod_base = OTHER; note = bicyclic nucleic acid (BNA)
  source 1..20: mol_type = other DNA
tcaaggaagatggcatttct

SEQ ID NO: 11237 - DNA, 20 bp, synthetic construct
  misc_feature 1..20: note = Description of Artificial Sequence: Synthetic Antisense oligonucleotide
  modified_base 9: mod_base = OTHER; note = bicyclic nucleic acid (BNA)
  modified_base 12: mod_base = OTHER; note = bicyclic nucleic acid (BNA)
  source 1..20: mol_type = other DNA
tcaaggaagatggcatttct

SEQ ID NO: 11238 - DNA, 20 bp, synthetic construct
  misc_feature 1..20: note = Description of Artificial Sequence: Synthetic Antisense oligonucleotide
  modified_base 2: mod_base = OTHER; note = bicyclic nucleic acid (BNA)
  modified_base 5: mod_base = OTHER; note = bicyclic nucleic acid (BNA)
  source 1..20: mol_type = other DNA
tcaaggaagatggcatttct

SEQ ID NO: 11239 - DNA, 20 bp, synthetic construct
  misc_feature 1..20: note = Description of Artificial Sequence: Synthetic Antisense oligonucleotide
  modified_base 13: mod_base = OTHER; note = bicyclic nucleic acid (BNA)
  modified_base 19: mod_base = OTHER; note = bicyclic nucleic acid (BNA)
  source 1..20: mol_type = other DNA
tcaaggaagatggcatttct

SEQ ID NO: 11240 - DNA, 20 bp, synthetic construct
  misc_feature 1..20: note = Description of Artificial Sequence: Synthetic Antisense oligonucleotide
  modified_base 12..13: mod_base = OTHER; note = bicyclic nucleic acid (BNA)
  source 1..20: mol_type = other DNA
tcaaggaagatggcatttct

SEQ ID NO: 11241 - DNA, 20 bp, synthetic construct
  misc_feature 1..20: note = Description of Artificial Sequence: Synthetic Antisense oligonucleotide
  modified_base 5: mod_base = OTHER; note = bicyclic nucleic acid (BNA)
  modified_base 12: mod_base = OTHER; note = bicyclic nucleic acid (BNA)
  source 1..20: mol_type = other DNA
tcaaggaagatggcatttct

SEQ ID NO: 11242 - DNA, 20 bp, synthetic construct
  misc_feature 1..20: note = Description of Artificial Sequence: Synthetic Antisense oligonucleotide
  modified_base 2: mod_base = OTHER; note = bicyclic nucleic acid (BNA)
  modified_base 13: mod_base = OTHER; note = bicyclic nucleic acid (BNA)
  source 1..20: mol_type = other DNA
tcaaggaagatggcatttct

SEQ ID NO: 11243 - DNA, 20 bp, synthetic construct
  misc_feature 1..20: note = Description of Artificial Sequence: Synthetic Antisense oligonucleotide
  modified_base 9: mod_base = OTHER; note = bicyclic nucleic acid (BNA)
  modified_base 13: mod_base = OTHER; note = bicyclic nucleic acid (BNA)
  source 1..20: mol_type = other DNA
tcaaggaagatggcatttct

SEQ ID NO: 11244 - DNA, 20 bp, synthetic construct
  misc_feature 1..20: note = Description of Artificial Sequence: Synthetic Antisense oligonucleotide
  modified_base 2: mod_base = OTHER; note = bicyclic nucleic acid (BNA)
  modified_base 19: mod_base = OTHER; note = bicyclic nucleic acid (BNA)
  source 1..20: mol_type = other DNA
tcaaggaagatggcatttct

SEQ ID NO: 11245 - DNA, 20 bp, synthetic construct
  misc_feature 1..20: note = Description of Artificial Sequence: Synthetic Antisense oligonucleotide
  modified_base 2: mod_base = OTHER; note = bicyclic nucleic acid (BNA)
  modified_base 9: mod_base = OTHER; note = bicyclic nucleic acid (BNA)
  source 1..20: mol_type = other DNA
tcaaggaagatggcatttct

SEQ ID NO: 11246 - DNA, 20 bp, synthetic construct
  misc_feature 1..20: note = Description of Artificial Sequence: Synthetic Antisense oligonucleotide
  modified_base 14: mod_base = OTHER; note = bicyclic nucleic acid (BNA)
  modified_base 19: mod_base = OTHER; note = bicyclic nucleic acid (BNA)
  source 1..20: mol_type = other DNA
tcaaggaagatggcatttct

SEQ ID NO: 11247 - DNA, 20 bp, synthetic construct
  misc_feature 1..20: note = Description of Artificial Sequence: Synthetic Antisense oligonucleotide
  modified_base 9: mod_base = OTHER; note = bicyclic nucleic acid (BNA)
  modified_base 19: mod_base = OTHER; note = bicyclic nucleic acid (BNA)
  source 1..20: mol_type = other DNA
tcaaggaagatggcatttct

SEQ ID NO: 11248 - DNA, 22 bp, synthetic construct
  misc_feature 1..22: note = Description of Artificial Sequence: Synthetic Antisense oligonucleotide
  modified_base 9: mod_base = OTHER; note = bicyclic nucleic acid (BNA)
  modified_base 14: mod_base = OTHER; note = bicyclic nucleic acid (BNA)
  source 1..22: mol_type = other DNA
tcaaggaagatggcatttctag

SEQ ID NO: 11249 - DNA, 22 bp, synthetic construct
  misc_feature 1..22: note = Description of Artificial Sequence: Synthetic Antisense oligonucleotide
  modified_base 5: mod_base = OTHER; note = bicyclic nucleic acid (BNA)
  modified_base 9: mod_base = OTHER; note = bicyclic nucleic acid (BNA)
  source 1..22: mol_type = other DNA
tcaaggaagatggcatttctag

SEQ ID NO: 11250 - DNA, 22 bp, synthetic construct
  misc_feature 1..22: note = Description of Artificial Sequence: Synthetic Antisense oligonucleotide
  modified_base 5: mod_base = OTHER; note = bicyclic nucleic acid (BNA)
  modified_base 19: mod_base = OTHER; note = bicyclic nucleic acid (BNA)
  source 1..22: mol_type = other DNA
tcaaggaagatggcatttctag

SEQ ID NO: 11251 - DNA, 22 bp, synthetic construct
  misc_feature 1..22: note = Description of Artificial Sequence: Synthetic Antisense oligonucleotide
  modified_base 6: mod_base = OTHER; note = bicyclic nucleic acid (BNA)
  modified_base 14: mod_base = OTHER; note = bicyclic nucleic acid (BNA)
  source 1..22: mol_type = other DNA
tcaaggaagatggcatttctag

SEQ ID NO: 11252 - DNA, 22 bp, synthetic construct
  misc_feature 1..22: note = Description of Artificial Sequence: Synthetic Antisense oligonucleotide
  modified_base 5: mod_base = OTHER; note = bicyclic nucleic acid (BNA)
  modified_base 13: mod_base = OTHER; note = bicyclic nucleic acid (BNA)
  source 1..22: mol_type = other DNA
tcaaggaagatggcatttctag

SEQ ID NO: 11253 - DNA, 22 bp, synthetic construct
  misc_feature 1..22: note = Description of Artificial Sequence: Synthetic Antisense oligonucleotide
  modified_base 2: mod_base = OTHER; note = bicyclic nucleic acid (BNA)
  modified_base 12: mod_base = OTHER; note = bicyclic nucleic acid (BNA)
  source 1..22: mol_type = other DNA
tcaaggaagatggcatttctag

SEQ ID NO: 11254 - DNA, 22 bp, synthetic construct
  misc_feature 1..22: note = Description of Artificial Sequence: Synthetic Antisense oligonucleotide
  modified_base 6: mod_base = OTHER; note = bicyclic nucleic acid (BNA)
  modified_base 9: mod_base = OTHER; note = bicyclic nucleic acid (BNA)
  source 1..22: mol_type = other DNA
tcaaggaagatggcatttctag

SEQ ID NO: 11255 - DNA, 22 bp, synthetic construct
  misc_feature 1..22: note = Description of Artificial Sequence: Synthetic Antisense oligonucleotide
  modified_base 13..14: mod_base = OTHER; note = bicyclic nucleic acid (BNA)
  source 1..22: mol_type = other DNA
tcaaggaagatggcatttctag

SEQ ID NO: 11256 - DNA, 22 bp, synthetic construct
  misc_feature 1..22: note = Description of Artificial Sequence: Synthetic Antisense oligonucleotide
  modified_base 6: mod_base = OTHER; note = bicyclic nucleic acid (BNA)
  modified_base 13: mod_base = OTHER; note = bicyclic nucleic acid (BNA)
  source 1..22: mol_type = other DNA
tcaaggaagatggcatttctag

SEQ ID NO: 11257 - DNA, 22 bp, synthetic construct
  misc_feature 1..22: note = Description of Artificial Sequence: Synthetic Antisense oligonucleotide
  modified_base 6: mod_base = OTHER; note = bicyclic nucleic acid (BNA)
  modified_base 19: mod_base = OTHER; note = bicyclic nucleic acid (BNA)
  source 1..22: mol_type = other DNA
tcaaggaagatggcatttctag

SEQ ID NO: 11258 - DNA, 22 bp, synthetic construct
  misc_feature 1..22: note = Description of Artificial Sequence: Synthetic Antisense oligonucleotide
  modified_base 5: mod_base = OTHER; note = bicyclic nucleic acid (BNA)
  modified_base 14: mod_base = OTHER; note = bicyclic nucleic acid (BNA)
  source 1..22: mol_type = other DNA
tcaaggaagatggcatttctag

SEQ ID NO: 11259 - DNA, 22 bp, synthetic construct
  misc_feature 1..22: note = Description of Artificial Sequence: Synthetic Antisense oligonucleotide
  modified_base 2: mod_base = OTHER; note = bicyclic nucleic acid (BNA)
  modified_base 6: mod_base = OTHER; note = bicyclic nucleic acid (BNA)
  source 1..22: mol_type = other DNA
tcaaggaagatggcatttctag

SEQ ID NO: 11260 - DNA, 22 bp, synthetic construct
  misc_feature 1..22: note = Description of Artificial Sequence: Synthetic Antisense oligonucleotide
  modified_base 12: mod_base = OTHER; note = bicyclic nucleic acid (BNA)
  modified_base 19: mod_base = OTHER; note = bicyclic nucleic acid (BNA)
  source 1..22: mol_type = other DNA
tcaaggaagatggcatttctag

SEQ ID NO: 11261 - DNA, 22 bp, synthetic construct
  misc_feature 1..22: note = Description of Artificial Sequence: Synthetic Antisense oligonucleotide
  modified_base 12: mod_base = OTHER; note = bicyclic nucleic acid (BNA)
  modified_base 14: mod_base = OTHER; note = bicyclic nucleic acid (BNA)
  source 1..22: mol_type = other DNA
tcaaggaagatggcatttctag

SEQ ID NO: 11262 - DNA, 22 bp, synthetic construct
  misc_feature 1..22: note = Description of Artificial Sequence: Synthetic Antisense oligonucleotide
  modified_base 6: mod_base = OTHER; note = bicyclic nucleic acid (BNA)
  modified_base 12: mod_base = OTHER; note = bicyclic nucleic acid (BNA)
  source 1..22: mol_type = other DNA
tcaaggaagatggcatttctag

SEQ ID NO: 11263 - DNA, 22 bp, synthetic construct
  misc_feature 1..22: note = Description of Artificial Sequence: Synthetic Antisense oligonucleotide
  modified_base 5..6: mod_base = OTHER; note = bicyclic nucleic acid (BNA)
  source 1..22: mol_type = other DNA
tcaaggaagatggcatttctag

SEQ ID NO: 11264 - DNA, 22 bp, synthetic construct
  misc_feature 1..22: note = Description of Artificial Sequence: Synthetic Antisense oligonucleotide
  modified_base 2: mod_base = OTHER; note = bicyclic nucleic acid (BNA)
  modified_base 14: mod_base = OTHER; note = bicyclic nucleic acid (BNA)
  source 1..22: mol_type = other DNA
tcaaggaagatggcatttctag

SEQ ID NO: 11265 - DNA, 22 bp, synthetic construct
  misc_feature 1..22: note = Description of Artificial Sequence: Synthetic Antisense oligonucleotide
  modified_base 9: mod_base = OTHER; note = bicyclic nucleic acid (BNA)
  modified_base 12: mod_base = OTHER; note = bicyclic nucleic acid (BNA)
  source 1..22: mol_type = other DNA
tcaaggaagatggcatttctag

SEQ ID NO: 11266 - DNA, 22 bp, synthetic construct
  misc_feature 1..22: note = Description of Artificial Sequence: Synthetic Antisense oligonucleotide
  modified_base 2: mod_base = OTHER; note = bicyclic nucleic acid (BNA)
  modified_base 5: mod_base = OTHER; note = bicyclic nucleic acid (BNA)
  source 1..22: mol_type = other DNA
tcaaggaagatggcatttctag

SEQ ID NO: 11267 - DNA, 22 bp, synthetic construct
  misc_feature 1..22: note = Description of Artificial Sequence: Synthetic Antisense oligonucleotide
  modified_base 13: mod_base = OTHER; note = bicyclic nucleic acid (BNA)
  modified_base 19: mod_base = OTHER; note = bicyclic nucleic acid (BNA)
  source 1..22: mol_type = other DNA
tcaaggaagatggcatttctag

SEQ ID NO: 11268 - DNA, 22 bp, synthetic construct
  misc_feature 1..22: note = Description of Artificial Sequence: Synthetic Antisense oligonucleotide
  modified_base 12..13: mod_base = OTHER; note = bicyclic nucleic acid (BNA)
  source 1..22: mol_type = other DNA
tcaaggaagatggcatttctag

SEQ ID NO: 11269 - DNA, 22 bp, synthetic construct
  misc_feature 1..22: note = Description of Artificial Sequence: Synthetic Antisense oligonucleotide
  modified_base 5: mod_base = OTHER; note = bicyclic nucleic acid (BNA)
  modified_base 12: mod_base = OTHER; note = bicyclic nucleic acid (BNA)
  source 1..22: mol_type = other DNA
tcaaggaagatggcatttctag

SEQ ID NO: 11270 - DNA, 22 bp, synthetic construct
  misc_feature 1..22: note = Description of Artificial Sequence: Synthetic Antisense oligonucleotide
  modified_base 2: mod_base = OTHER; note = bicyclic nucleic acid (BNA)
  modified_base 13: mod_base = OTHER; note = bicyclic nucleic acid (BNA)
  source 1..22: mol_type = other DNA
tcaaggaagatggcatttctag

SEQ ID NO: 11271 - DNA, 22 bp, synthetic construct
  misc_feature 1..22: note = Description of Artificial Sequence: Synthetic Antisense oligonucleotide
  modified_base 9: mod_base = OTHER; note = bicyclic nucleic acid (BNA)
  modified_base 13: mod_base = OTHER; note = bicyclic nucleic acid (BNA)
  source 1..22: mol_type = other DNA
tcaaggaagatggcatttctag

SEQ ID NO: 11272 - DNA, 22 bp, synthetic construct
  misc_feature 1..22: note = Description of Artificial Sequence: Synthetic Antisense oligonucleotide
  modified_base 2: mod_base = OTHER; note = bicyclic nucleic acid (BNA)
  modified_base 19: mod_base = OTHER; note = bicyclic nucleic acid (BNA)
  source 1..22: mol_type = other DNA
tcaaggaagatggcatttctag

SEQ ID NO: 11273 - DNA, 22 bp, synthetic construct
  misc_feature 1..22: note = Description of Artificial Sequence: Synthetic Antisense oligonucleotide
  modified_base 2: mod_base = OTHER; note = bicyclic nucleic acid (BNA)
  modified_base 9: mod_base = OTHER; note = bicyclic nucleic acid (BNA)
  source 1..22: mol_type = other DNA
tcaaggaagatggcatttctag

SEQ ID NO: 11274 - DNA, 22 bp, synthetic construct
  misc_feature 1..22: note = Description of Artificial Sequence: Synthetic Antisense oligonucleotide
  modified_base 14: mod_base = OTHER; note = bicyclic nucleic acid (BNA)
  modified_base 19: mod_base = OTHER; note = bicyclic nucleic acid (BNA)
  source 1..22: mol_type = other DNA
tcaaggaagatggcatttctag

SEQ ID NO: 11275 - DNA, 22 bp, synthetic construct
  misc_feature 1..22: note = Description of Artificial Sequence: Synthetic Antisense oligonucleotide
  modified_base 9: mod_base = OTHER; note = bicyclic nucleic acid (BNA)
  modified_base 19: mod_base = OTHER; note = bicyclic nucleic acid (BNA)
  source 1..22: mol_type = other DNA
tcaaggaagatggcatttctag

SEQ ID NO: 11276 - DNA, 18 bp, synthetic construct
  misc_feature 1..18: note = Description of Artificial Sequence: Synthetic Antisense oligonucleotide
  modified_base 2: mod_base = OTHER; note = bicyclic nucleic acid (BNA)
  modified_base 9: mod_base = OTHER; note = 5-methyl
  modified_base 13..14: mod_base = OTHER; note = 5-methyl
  modified_base 18: mod_base = OTHER; note = 5-methyl
  source 1..18: mol_type = other DNA
ggtaagttctgtccaagc

SEQ ID NO: 11277 - DNA, 18 bp, synthetic construct
  misc_feature 1..18: note = Description of Artificial Sequence: Synthetic Antisense oligonucleotide
  modified_base 9: mod_base = OTHER; note = 5-methyl
  modified_base 13..14: mod_base = OTHER; note = 5-methyl
  modified_base 18: mod_base = OTHER; note = 5-methyl
  modified_base 9: mod_base = OTHER; note = bicyclic nucleic acid (BNA)
  source 1..18: mol_type = other DNA
ggtaagttctgtccaagc

SEQ ID NO: 11278 - DNA, 18 bp, synthetic construct
  misc_feature 1..18: note = Description of Artificial Sequence: Synthetic Antisense oligonucleotide
  modified_base 9: mod_base = OTHER; note = 5-methyl
  modified_base 13..14: mod_base = OTHER; note = 5-methyl
  modified_base 18: mod_base = OTHER; note = 5-methyl
  modified_base 11: mod_base = OTHER; note = bicyclic nucleic acid (BNA)
  source 1..18: mol_type = other DNA
ggtaagttctgtccaagc

SEQ ID NO: 11279 - DNA, 18 bp, synthetic construct
  misc_feature 1..18: note = Description of Artificial Sequence: Synthetic Antisense oligonucleotide
  modified_base 6: mod_base = OTHER; note = bicyclic nucleic acid (BNA)
  modified_base 9: mod_base = OTHER; note = 5-methyl
  modified_base 13..14: mod_base = OTHER; note = 5-methyl
  modified_base 18: mod_base = OTHER; note = 5-methyl
  source 1..18: mol_type = other DNA
ggtaagttctgtccaagc

SEQ ID NO: 11280 - DNA, 18 bp, synthetic construct
  misc_feature 1..18: note = Description of Artificial Sequence: Synthetic Antisense oligonucleotide
  modified_base 9: mod_base = OTHER; note = 5-methyl
  modified_base 13..14: mod_base = OTHER; note = 5-methyl
  modified_base 18: mod_base = OTHER; note = 5-methyl
  modified_base 17: mod_base = OTHER; note = bicyclic nucleic acid (BNA)
  source 1..18: mol_type = other DNA
ggtaagttctgtccaagc

SEQ ID NO: 11281 - DNA, 18 bp, synthetic construct
  misc_feature 1..18: note = Description of Artificial Sequence: Synthetic Antisense oligonucleotide
  modified_base 9: mod_base = OTHER; note = 5-methyl
  modified_base 13..14: mod_base = OTHER; note = 5-methyl
  modified_base 18: mod_base = OTHER; note = 5-methyl
  modified_base 13: mod_base = OTHER; note = bicyclic nucleic acid (BNA)
  source 1..18: mol_type = other DNA
ggtaagttctgtccaagc

SEQ ID NO: 11282 - DNA, 18 bp, synthetic construct
  misc_feature 1..18: note = Description of Artificial Sequence: Synthetic Antisense oligonucleotide
  modified_base 9: mod_base = OTHER; note = 5-methyl
  modified_base 13..14: mod_base = OTHER; note = 5-methyl
  modified_base 18: mod_base = OTHER; note = 5-methyl
  modified_base 14: mod_base = OTHER; note = bicyclic nucleic acid (BNA)
  source 1..18: mol_type = other DNA
ggtaagttctgtccaagc

SEQ ID NO: 11283 - DNA, 18 bp, synthetic construct
  misc_feature 1..18: note = Description of Artificial Sequence: Synthetic Antisense oligonucleotide
  modified_base 8: mod_base = OTHER; note = 5-methyl
  modified_base 12..13: mod_base = OTHER; note = 5-methyl
  modified_base 17..18: mod_base = OTHER; note = 5-methyl
  modified_base 16: mod_base = OTHER; note = bicyclic nucleic acid (BNA)
  source 1..18: mol_type = other DNA
gtaagttctgtccaagcc

SEQ ID NO: 11284 - DNA, 18 bp, synthetic construct
  misc_feature 1..18: note = Description of Artificial Sequence: Synthetic Antisense oligonucleotide
  modified_base 8: mod_base = OTHER; note = 5-methyl
  modified_base 12..13: mod_base = OTHER; note = 5-methyl
  modified_base 17..18: mod_base = OTHER; note = 5-methyl
  modified_base 10: mod_base = OTHER; note = bicyclic nucleic acid (BNA)
  source 1..18: mol_type = other DNA
gtaagttctgtccaagcc

SEQ ID NO: 11285 - DNA, 18 bp, synthetic construct
  misc_feature 1..18: note = Description of Artificial Sequence: Synthetic Antisense oligonucleotide
  modified_base 5: mod_base = OTHER; note = bicyclic nucleic acid (BNA)
  modified_base 8: mod_base = OTHER; note = 5-methyl
  modified_base 12..13: mod_base = OTHER; note = 5-methyl
  modified_base 17..18: mod_base = OTHER; note = 5-methyl
  source 1..18: mol_type = other DNA
gtaagttctgtccaagcc

SEQ ID NO: 11286 - DNA, 18 bp, synthetic construct
  misc_feature 1..18: note = Description of Artificial Sequence: Synthetic Antisense oligonucleotide
  modified_base 8: mod_base = OTHER; note = 5-methyl
  modified_base 12..13: mod_base = OTHER; note = 5-methyl
  modified_base 17..18: mod_base = OTHER; note = 5-methyl
  modified_base 17: mod_base = OTHER; note = bicyclic nucleic acid (BNA)
  source 1..18: mol_type = other DNA
gtaagttctgtccaagcc

SEQ ID NO: 11287 - DNA, 18 bp, synthetic construct
  misc_feature 1..18: note = Description of Artificial Sequence: Synthetic Antisense oligonucleotide
  modified_base 8: mod_base = OTHER; note = 5-methyl
  modified_base 12..13: mod_base = OTHER; note = 5-methyl
  modified_base 17..18: mod_base = OTHER; note = 5-methyl
  modified_base 12: mod_base = OTHER; note = bicyclic nucleic acid (BNA)
  source 1..18: mol_type = other DNA
gtaagttctgtccaagcc

SEQ ID NO: 11288 - DNA, 18 bp, synthetic construct
  misc_feature 1..18: note = Description of Artificial Sequence: Synthetic Antisense oligonucleotide
  modified_base 8: mod_base = OTHER; note = 5-methyl
  modified_base 12..13: mod_base = OTHER; note = 5-methyl
  modified_base 17..18: mod_base = OTHER; note = 5-methyl
  modified_base 13: mod_base = OTHER; note = bicyclic nucleic acid (BNA)
  source 1..18: mol_type = other DNA
gtaagttctgtccaagcc

SEQ ID NO: 11289 - DNA, 18 bp, synthetic construct
  misc_feature 1..18: note = Description of Artificial Sequence: Synthetic Antisense oligonucleotide
  modified_base 8: mod_base = OTHER; note = 5-methyl
  modified_base 12..13: mod_base = OTHER; note = 5-methyl
  modified_base 17..18: mod_base = OTHER; note = 5-methyl
  modified_base 8: mod_base = OTHER; note = bicyclic nucleic acid (BNA)
  source 1..18: mol_type = other DNA
gtaagttctgtccaagcc

SEQ ID NO: 11290 - DNA, 18 bp, synthetic construct
  misc_feature 1..18: note = Description of Artificial Sequence: Synthetic Antisense oligonucleotide
  modified_base 2: mod_base = OTHER; note = bicyclic nucleic acid (BNA)
  modified_base 4: mod_base = OTHER; note = 5-methyl
  modified_base 13: mod_base = OTHER; note = 5-methyl
  modified_base 17..18: mod_base = OTHER; note = 5-methyl
  source 1..18: mol_type = other DNA
agtcggtaagttctgtcc

SEQ ID NO: 11291 - DNA, 18 bp, synthetic construct
  misc_feature 1..18: note = Description of Artificial Sequence: Synthetic Antisense oligonucleotide
  modified_base 4: mod_base = OTHER; note = 5-methyl
  modified_base 13: mod_base = OTHER; note = 5-methyl
  modified_base 17..18: mod_base = OTHER; note = 5-methyl
  modified_base 4: mod_base = OTHER; note = bicyclic nucleic acid (BNA)
  source 1..18: mol_type = other DNA
agtcggtaagttctgtcc

SEQ ID NO: 11292 - DNA, 18 bp, synthetic construct
  misc_feature 1..18: note = Description of Artificial Sequence: Synthetic Antisense oligonucleotide
  modified_base 4: mod_base = OTHER; note = 5-methyl
  modified_base 13: mod_base = OTHER; note = 5-methyl
  modified_base 17..18: mod_base = OTHER; note = 5-methyl
  modified_base 10: mod_base = OTHER; note = bicyclic nucleic acid (BNA)
  source 1..18: mol_type = other DNA
agtcggtaagttctgtcc

SEQ ID NO: 11293 - DNA, 18 bp, synthetic construct
  misc_feature 1..18: note = Description of Artificial Sequence: Synthetic Antisense oligonucleotide
  modified_base 4: mod_base = OTHER; note = 5-methyl
  modified_base 13: mod_base = OTHER; note = 5-methyl
  modified_base 17..18: mod_base = OTHER; note = 5-methyl
  modified_base 5: mod_base = OTHER; note = bicyclic nucleic acid (BNA)
  source 1..18: mol_type = other DNA
agtcggtaagttctgtcc

SEQ ID NO: 11294 - DNA, 18 bp, synthetic construct
  misc_feature 1..18: note = Description of Artificial Sequence: Synthetic Antisense oligonucleotide
  modified_base 4: mod_base = OTHER; note = 5-methyl
  modified_base 13: mod_base = OTHER; note = 5-methyl
  modified_base 17..18: mod_base = OTHER; note = 5-methyl
  modified_base 6: mod_base = OTHER; note = bicyclic nucleic acid (BNA)
  source 1..18: mol_type = other DNA
agtcggtaagttctgtcc

SEQ ID NO: 11295 - DNA, 18 bp, synthetic construct
  misc_feature 1..18: note = Description of Artificial Sequence: Synthetic Antisense oligonucleotide
  modified_base 4: mod_base = OTHER; note = 5-methyl
  modified_base 13: mod_base = OTHER; note = 5-methyl
  modified_base 17..18: mod_base = OTHER; note = 5-methyl
  modified_base 17: mod_base = OTHER; note = bicyclic nucleic acid (BNA)
  source 1..18: mol_type = other DNA
agtcggtaagttctgtcc

SEQ ID NO: 11296 - DNA, 18 bp, synthetic construct
  misc_feature 1..18: note = Description of Artificial Sequence: Synthetic Antisense oligonucleotide
  modified_base 4: mod_base = OTHER; note = 5-methyl
  modified_base 13: mod_base = OTHER; note = 5-methyl
  modified_base 17..18: mod_base = OTHER; note = 5-methyl
  modified_base 13: mod_base = OTHER; note = bicyclic nucleic acid (BNA)
  source 1..18: mol_type = other DNA
agtcggtaagttctgtcc

SEQ ID NO: 11297 - DNA, 18 bp, synthetic construct
  misc_feature 1..18: note = Description of Artificial Sequence: Synthetic Antisense oligonucleotide
  modified_base 4: mod_base = OTHER; note = 5-methyl
  modified_base 13: mod_base = OTHER; note = 5-methyl
  modified_base 17..18: mod_base = OTHER; note = 5-methyl
  modified_base 15: mod_base = OTHER; note = bicyclic nucleic acid (BNA)
  source 1..18: mol_type = other DNA
agtcggtaagttctgtcc

SEQ ID NO: 11298 - DNA, 18 bp, synthetic construct
  misc_feature 1..18: note = Description of Artificial Sequence: Synthetic Antisense oligonucleotide
  modified_base 1: mod_base = OTHER; note = 5-methyl
  modified_base 5..6: mod_base = OTHER; note = 5-methyl
  modified_base 10..12: mod_base = OTHER; note = 5-methyl
  modified_base 3: mod_base = OTHER; note = bicyclic nucleic acid (BNA)
  source 1..18: mol_type = other DNA
ctgtccaagcccggttga

SEQ ID NO: 11299 - DNA, 18 bp, synthetic construct
  misc_feature 1..18: note = Description of Artificial Sequence: Synthetic Antisense oligonucleotide
  modified_base 1: mod_base = OTHER; note = 5-methyl
  modified_base 5..6: mod_base = OTHER; note = 5-methyl
  modified_base 10..12: mod_base = OTHER; note = 5-methyl
  modified_base 9: mod_base = OTHER; note = bicyclic nucleic acid (BNA)
  source 1..18: mol_type = other DNA
ctgtccaagcccggttga

SEQ ID NO: 11300 - DNA, 18 bp, synthetic construct
  misc_feature 1..18: note = Description of Artificial Sequence: Synthetic Antisense oligonucleotide
  modified_base 1: mod_base = OTHER; note = 5-methyl
  modified_base 5..6: mod_base = OTHER; note = 5-methyl
  modified_base 10..12: mod_base = OTHER; note = 5-methyl
  modified_base 10: mod_base = OTHER; note = bicyclic nucleic acid (BNA)
  source 1..18: mol_type = other DNA
ctgtccaagcccggttga

SEQ ID NO: 11301 - DNA, 18 bp, synthetic construct
  misc_feature 1..18: note = Description of Artificial Sequence: Synthetic Antisense oligonucleotide
  modified_base 1: mod_base = OTHER; note = 5-methyl
  modified_base 5..6: mod_base = OTHER; note = 5-methyl
  modified_base 10..12: mod_base = OTHER; note = 5-methyl
  modified_base 5: mod_base = OTHER; note = bicyclic nucleic acid (BNA)
  source 1..18: mol_type = other DNA
ctgtccaagcccggttga

SEQ ID NO: 11302 - DNA, 18 bp, synthetic construct
  misc_feature 1..18: note = Description of Artificial Sequence: Synthetic Antisense oligonucleotide
  modified_base 1: mod_base = OTHER; note = 5-methyl
  modified_base 5..6: mod_base = OTHER; note = 5-methyl
  modified_base 10..12: mod_base = OTHER; note = 5-methyl
  modified_base 11: mod_base = OTHER; note = bicyclic nucleic acid (BNA)
  source 1..18: mol_type = other DNA
ctgtccaagcccggttga

SEQ ID NO: 11303 - DNA, 18 bp, synthetic construct
  misc_feature 1..18: note = Description of Artificial Sequence: Synthetic Antisense oligonucleotide
  modified_base 1: mod_base = OTHER; note = 5-methyl
  modified_base 5..6: mod_base = OTHER; note = 5-methyl
  modified_base 10..12: mod_base = OTHER; note = 5-methyl
  modified_base 6: mod_base = OTHER; note = bicyclic nucleic acid (BNA)
  source 1..18: mol_type = other DNA
ctgtccaagcccggttga

SEQ ID NO: 11304 - DNA, 18 bp, synthetic construct
  misc_feature 1..18: note = Description of Artificial Sequence: Synthetic Antisense oligonucleotide
  modified_base 1: mod_base = OTHER; note = 5-methyl
  modified_base 5..6: mod_base = OTHER; note = 5-methyl
  modified_base 10..12: mod_base = OTHER; note = 5-methyl
  modified_base 17: mod_base = OTHER; note = bicyclic nucleic acid (BNA)
  source 1..18: mol_type = other DNA
ctgtccaagcccggttga

SEQ ID NO: 11305 - DNA, 18 bp, synthetic construct
  misc_feature 1..18: note = Description of Artificial Sequence: Synthetic Antisense oligonucleotide
  modified_base 1: mod_base = OTHER; note = 5-methyl
  modified_base 5..6: mod_base = OTHER; note = 5-methyl
  modified_base 10..12: mod_base = OTHER; note = 5-methyl
  modified_base 12: mod_base = OTHER; note = bicyclic nucleic acid (BNA)
  source 1..18: mol_type = other DNA
ctgtccaagcccggttga

SEQ ID NO: 11306 - DNA, 18 bp, synthetic construct
  misc_feature 1..18: note = Description of Artificial Sequence: Synthetic Antisense oligonucleotide
  modified_base 1: mod_base = OTHER; note = 5-methyl
  modified_base 5..6: mod_base = OTHER; note = 5-methyl
  modified_base 10..12: mod_base = OTHER; note = 5-methyl
  modified_base 13: mod_base = OTHER; note = bicyclic nucleic acid (BNA)
  source 1..18: mol_type = other DNA
ctgtccaagcccggttga

SEQ ID NO: 11307 - DNA, 18 bp, synthetic construct
  misc_feature 1..18: note = Description of Artificial Sequence: Synthetic Antisense oligonucleotide
  modified_base 1: mod_base = OTHER; note = 5-methyl
  modified_base 5..6: mod_base = OTHER; note = 5-methyl
  modified_base 10..12: mod_base = OTHER; note = 5-methyl
  modified_base 14: mod_base = OTHER; note = bicyclic nucleic acid (BNA)
  source 1..18: mol_type = other DNA
ctgtccaagcccggttga

SEQ ID NO: 11308 - DNA, 18 bp, synthetic construct
  misc_feature 1..18: note = Description of Artificial Sequence: Synthetic Antisense oligonucleotide
  modified_base 9: mod_base = OTHER; note = 5-methyl
  modified_base 13..14: mod_base = OTHER; note = 5-methyl
  modified_base 18: mod_base = OTHER; note = 5-methyl
  modified_base 9: mod_base = OTHER; note = bicyclic nucleic acid (BNA)
  modified_base 14: mod_base = OTHER; note = bicyclic nucleic acid (BNA)
  source 1..18: mol_type = other DNA
ggtaagttctgtccaagc

SEQ ID NO: 11309 - DNA, 18 bp, synthetic construct
  misc_feature 1..18: note = Description of Artificial Sequence: Synthetic Antisense oligonucleotide
  modified_base 6: mod_base = OTHER; note = bicyclic nucleic acid (BNA)
  modified_base 14: mod_base = OTHER; note = bicyclic nucleic acid (BNA)
  modified_base 9: mod_base = OTHER; note = 5-methyl
  modified_base 13..14: mod_base = OTHER; note = 5-methyl
  modified_base 18: mod_base = OTHER; note = 5-methyl
  source 1..18: mol_type = other DNA
ggtaagttctgtccaagc

SEQ ID NO: 11310 - DNA, 18 bp, synthetic construct
  misc_feature 1..18: note = Description of Artificial Sequence: Synthetic Antisense oligonucleotide
  modified_base 9: mod_base = OTHER; note = 5-methyl
  modified_base 13..14: mod_base = OTHER; note = 5-methyl
  modified_base 18: mod_base = OTHER; note = 5-methyl
  modified_base 13: mod_base = OTHER; note = bicyclic nucleic acid (BNA)
  modified_base 17: mod_base = OTHER; note = bicyclic nucleic acid (BNA)
  source 1..18: mol_type = other DNA
ggtaagttctgtccaagc

SEQ ID NO: 11311 - DNA, 18 bp, synthetic construct
  misc_feature 1..18: note = Description of Artificial Sequence: Synthetic Antisense oligonucleotide
  modified_base 6: mod_base = OTHER; note = bicyclic nucleic acid (BNA)
  modified_base 9: mod_base = OTHER; note = bicyclic nucleic acid (BNA)
  modified_base 9: mod_base = OTHER; note = 5-methyl
  modified_base 13..14: mod_base = OTHER; note = 5-methyl
  modified_base 18: mod_base = OTHER; note = 5-methyl
  source 1..18: mol_type = other DNA
ggtaagttctgtccaagc

SEQ ID NO: 11312 - DNA, 18 bp, synthetic construct
  misc_feature 1..18: note = Description of Artificial Sequence: Synthetic Antisense oligonucleotide
  modified_base 9: mod_base = OTHER; note = 5-methyl
  modified_base 13..14: mod_base = OTHER; note = 5-methyl
  modified_base 18: mod_base = OTHER; note = 5-methyl
  modified_base 13..14: mod_base = OTHER; note = bicyclic nucleic acid (BNA)
  source 1..18: mol_type = other DNA
ggtaagttctgtccaagc

SEQ ID NO: 11313 - DNA, 18 bp, synthetic construct
  misc_feature 1..18: note = Description of Artificial Sequence: Synthetic Antisense oligonucleotide
  modified_base 2: mod_base = OTHER; note = bicyclic nucleic acid (BNA)
  modified_base 17: mod_base = OTHER; note = bicyclic nucleic acid (BNA)
  modified_base 9: mod_base = OTHER; note = 5-methyl
  modified_base 13..14: mod_base = OTHER; note = 5-methyl
  modified_base 18: mod_base = OTHER; note = 5-methyl
  source 1..18: mol_type = other DNA
ggtaagttctgtccaagc

SEQ ID NO: 11314 - DNA, 18 bp, synthetic construct
  misc_feature 1..18: note = Description of Artificial Sequence: Synthetic Antisense oligonucleotide
  modified_base 6: mod_base = OTHER; note = bicyclic nucleic acid (BNA)
  modified_base 13: mod_base = OTHER; note = bicyclic nucleic acid (BNA)
  modified_base 9: mod_base = OTHER; note = 5-methyl
  modified_base 13..14: mod_base = OTHER; note = 5-methyl
  modified_base 18: mod_base = OTHER; note = 5-methyl
  source 1..18: mol_type = other DNA
ggtaagttctgtccaagc

SEQ ID NO: 11315 - DNA, 18 bp, synthetic construct
  misc_feature 1..18: note = Description of Artificial Sequence: Synthetic Antisense oligonucleotide
  modified_base 9: mod_base = OTHER; note = 5-methyl
  modified_base 13..14: mod_base = OTHER; note = 5-methyl
  modified_base 18: mod_base = OTHER; note = 5-methyl
  modified_base 9: mod_base = OTHER; note = bicyclic nucleic acid (BNA)
  modified_base 11: mod_base = OTHER; note = bicyclic nucleic acid (BNA)
  source 1..18: mol_type = other DNA
ggtaagttctgtccaagc

SEQ ID NO: 11316 - DNA, 18 bp, synthetic construct
  misc_feature 1..18: note = Description of Artificial Sequence: Synthetic Antisense oligonucleotide
  modified_base 9: mod_base = OTHER; note = 5-methyl
  modified_base 13..14: mod_base = OTHER; note = 5-methyl
  modified_base 18: mod_base = OTHER; note = 5-methyl
  modified_base 14: mod_base = OTHER; note = bicyclic nucleic acid (BNA)
  modified_base 17: mod_base = OTHER; note = bicyclic nucleic acid (BNA)
  source 1..18: mol_type = other DNA
ggtaagttctgtccaagc

SEQ ID NO: 11317 - DNA, 18 bp, synthetic construct
  misc_feature 1..18: note = Description of Artificial Sequence: Synthetic Antisense oligonucleotide
  modified_base 9: mod_base = OTHER; note = 5-methyl
  modified_base 13..14: mod_base = OTHER; note = 5-methyl
  modified_base 18: mod_base = OTHER; note = 5-methyl
  modified_base 11: mod_base = OTHER; note = bicyclic nucleic acid (BNA)
  modified_base 13: mod_base = OTHER; note = bicyclic nucleic acid (BNA)
  source 1..18: mol_type = other DNA
ggtaagttctgtccaagc

SEQ ID NO: 11318 - DNA, 18 bp, synthetic construct
  misc_feature 1..18: note = Description of Artificial Sequence: Synthetic Antisense oligonucleotide
  modified_base 2: mod_base = OTHER; note = bicyclic nucleic acid (BNA)
  modified_base 6: mod_base = OTHER; note = bicyclic nucleic acid (BNA)
  modified_base 9: mod_base = OTHER; note = 5-methyl
  modified_base 13..14: mod_base = OTHER; note = 5-methyl
  modified_base 18: mod_base = OTHER; note = 5-methyl
  source 1..18: mol_type = other DNA
ggtaagttctgtccaagc

SEQ ID NO: 11319 - DNA, 18 bp, synthetic construct
  misc_feature 1..18: note = Description of Artificial Sequence: Synthetic Antisense oligonucleotide
  modified_base 2: mod_base = OTHER; note = bicyclic nucleic acid (BNA)
  modified_base 11: mod_base = OTHER; note = bicyclic nucleic acid (BNA)
  modified_base 9: mod_base = OTHER; note = 5-methyl
  modified_base 13..14: mod_base = OTHER; note = 5-methyl
  modified_base 18: mod_base = OTHER; note = 5-methyl
  source 1..18: mol_type = other DNA
ggtaagttctgtccaagc

SEQ ID NO: 11320 - DNA, 18 bp, synthetic construct
  misc_feature 1..18: note = Description of Artificial Sequence: Synthetic Antisense oligonucleotide
  modified_base 9: mod_base = OTHER; note = 5-methyl
  modified_base 13..14: mod_base = OTHER; note = 5-methyl
  modified_base 18: mod_base = OTHER; note = 5-methyl
  modified_base 9: mod_base = OTHER; note = bicyclic nucleic acid (BNA)
  modified_base 17: mod_base = OTHER; note = bicyclic nucleic acid (BNA)
  source 1..18: mol_type = other DNA
ggtaagttctgtccaagc

SEQ ID NO: 11321 - DNA, 18 bp, synthetic construct
  misc_feature 1..18: note = Description of Artificial Sequence: Synthetic Antisense oligonucleotide
  modified_base 2: mod_base = OTHER; note = bicyclic nucleic acid (BNA)
  modified_base 14: mod_base = OTHER; note = bicyclic nucleic acid (BNA)
  modified_base 9: mod_base = OTHER; note = 5-methyl
  modified_base 13..14: mod_base = OTHER; note = 5-methyl
  modified_base 18: mod_base = OTHER; note = 5-methyl
  source 1..18: mol_type = other DNA
ggtaagttctgtccaagc

SEQ ID NO: 11322 - DNA, 18 bp, synthetic construct
  misc_feature 1..18: note = Description of Artificial Sequence: Synthetic Antisense oligonucleotide
  modified_base 9: mod_base = OTHER; note = 5-methyl
  modified_base 13..14: mod_base = OTHER; note = 5-methyl
  modified_base 18: mod_base = OTHER; note = 5-methyl
  modified_base 11: mod_base = OTHER; note = bicyclic nucleic acid (BNA)
  modified_base 14: mod_base = OTHER; note = bicyclic nucleic acid (BNA)
  source 1..18: mol_type = other DNA
ggtaagttctgtccaagc

SEQ ID NO: 11323 - DNA, 18 bp, synthetic construct
  misc_feature 1..18: note = Description of Artificial Sequence: Synthetic Antisense oligonucleotide
  modified_base 6: mod_base = OTHER; note = bicyclic nucleic acid (BNA)
  modified_base 11: mod_base = OTHER; note = bicyclic nucleic acid (BNA)
  modified_base 9: mod_base = OTHER; note = 5-methyl
  modified_base 13..14: mod_base = OTHER; note = 5-methyl
  modified_base 18: mod_base = OTHER; note = 5-methyl
  source 1..18: mol_type = other DNA
ggtaagttctgtccaagc

SEQ ID NO: 11324 - DNA, 18 bp, synthetic construct
  misc_feature 1..18: note = Description of Artificial Sequence: Synthetic Antisense oligonucleotide
  modified_base 2: mod_base = OTHER; note = bicyclic nucleic acid (BNA)
  modified_base 13: mod_base = OTHER; note = bicyclic nucleic acid (BNA)
  modified_base 9: mod_base = OTHER; note = 5-methyl
  modified_base 13..14: mod_base = OTHER; note = 5-methyl
  modified_base 18: mod_base = OTHER; note = 5-methyl
  source 1..18: mol_type = other DNA
ggtaagttctgtccaagc

SEQ ID NO: 11325 - DNA, 18 bp, synthetic construct
  misc_feature 1..18: note = Description of Artificial Sequence: Synthetic Antisense oligonucleotide
  modified_base 9: mod_base = OTHER; note = 5-methyl
  modified_base 13..14: mod_base = OTHER; note = 5-methyl
  modified_base 18: mod_base = OTHER; note = 5-methyl
  modified_base 9: mod_base = OTHER; note = bicyclic nucleic acid (BNA)
  modified_base 13: mod_base = OTHER; note = bicyclic nucleic acid (BNA)
  source 1..18: mol_type = other DNA
ggtaagttctgtccaagc

SEQ ID NO: 11326 - DNA, 18 bp, synthetic construct
  misc_feature 1..18: note = Description of Artificial Sequence: Synthetic Antisense oligonucleotide
  modified_base 6: mod_base = OTHER; note = bicyclic nucleic acid (BNA)
  modified_base 17: mod_base = OTHER; note = bicyclic nucleic acid (BNA)
  modified_base 9: mod_base = OTHER; note = 5-methyl
  modified_base 13..14: mod_base = OTHER; note = 5-methyl
  modified_base 18: mod_base = OTHER; note = 5-methyl
  source 1..18: mol_type = other DNA
ggtaagttctgtccaagc

SEQ ID NO: 11327 - DNA, 18 bp, synthetic construct
  misc_feature 1..18: note = Description of Artificial Sequence: Synthetic Antisense oligonucleotide
  modified_base 9: mod_base = OTHER; note = 5-methyl
  modified_base 13..14: mod_base = OTHER; note = 5-methyl
  modified_base 18: mod_base = OTHER; note = 5-methyl
  modified_base 11: mod_base = OTHER; note = bicyclic nucleic acid (BNA)
  modified_base 17: mod_base = OTHER; note = bicyclic nucleic acid (BNA)
  source 1..18: mol_type = other DNA
ggtaagttctgtccaagc

SEQ ID NO: 11328 - DNA, 18 bp, synthetic construct
  misc_feature 1..18: note = Description of Artificial Sequence: Synthetic Antisense oligonucleotide
  modified_base 2: mod_base = OTHER; note = bicyclic nucleic acid (BNA)
  modified_base 9: mod_base = OTHER; note = bicyclic nucleic acid (BNA)
  modified_base 9: mod_base = OTHER; note = 5-methyl
  modified_base 13..14: mod_base = OTHER; note = 5-methyl
  modified_base 18: mod_base = OTHER; note = 5-methyl
  source 1..18: mol_type = other DNA
ggtaagttctgtccaagc

SEQ ID NO: 11329 - DNA, 18 bp, synthetic construct
  misc_feature 1..18: note = Description of Artificial Sequence: Synthetic Antisense oligonucleotide
  modified_base 8: mod_base = OTHER; note = 5-methyl
  modified_base 12..13: mod_base = OTHER; note = 5-methyl
  modified_base 17..18: mod_base = OTHER; note = 5-methyl
  modified_base 12: mod_base = OTHER; note = bicyclic nucleic acid (BNA)
  modified_base 17: mod_base = OTHER; note = bicyclic nucleic acid (BNA)
  source 1..18: mol_type = other DNA
gtaagttctgtccaagcc

SEQ ID NO: 11330 - DNA, 18 bp, synthetic construct
  misc_feature 1..18: note = Description of Artificial Sequence: Synthetic Antisense oligonucleotide
  modified_base 5: mod_base = OTHER; note = bicyclic nucleic acid (BNA)
  modified_base 8: mod_base = OTHER; note = bicyclic nucleic acid (BNA)
  modified_base 8: mod_base = OTHER; note = 5-methyl
  modified_base 12..13: mod_base = OTHER; note = 5-methyl
  modified_base 17..18: mod_base = OTHER; note = 5-methyl
  source 1..18: mol_type = other DNA
gtaagttctgtccaagcc

SEQ ID NO: 11331 - DNA, 18 bp, synthetic construct
  misc_feature 1..18: note = Description of Artificial Sequence: Synthetic Antisense oligonucleotide
  modified_base 8: mod_base = OTHER; note = 5-methyl
  modified_base 12..13: mod_base = OTHER; note = 5-methyl
  modified_base 17..18: mod_base = OTHER; note = 5-methyl
  modified_base 8: mod_base = OTHER; note = bicyclic nucleic acid (BNA)
  modified_base 13: mod_base = OTHER; note = bicyclic nucleic acid (BNA)
  source 1..18: mol_type = other DNA
gtaagttctgtccaagcc

SEQ ID NO: 11332 - DNA, 18 bp, synthetic construct
  misc_feature 1..18: note = Description of Artificial Sequence: Synthetic Antisense oligonucleotide
  modified_base 5: mod_base = OTHER; note = bicyclic nucleic acid (BNA)
  modified_base 13: mod_base = OTHER; note = bicyclic nucleic acid (BNA)
  modified_base 8: mod_base = OTHER; note = 5-methyl
  modified_base 12..13: mod_base = OTHER; note = 5-methyl
  modified_base 17..18: mod_base = OTHER; note = 5-methyl
  source 1..18: mol_type = other DNA
gtaagttctgtccaagcc

SEQ ID NO: 11333 - DNA, 18 bp, synthetic construct
  misc_feature 1..18: note = Description of Artificial Sequence: Synthetic Antisense oligonucleotide
  modified_base 8: mod_base = OTHER; note = 5-methyl
  modified_base 12..13: mod_base = OTHER; note = 5-methyl
  modified_base 17..18: mod_base = OTHER; note = 5-methyl
  modified_base 8: mod_base = OTHER; note = bicyclic nucleic acid (BNA)
  modified_base 17: mod_base = OTHER; note = bicyclic nucleic acid (BNA)
  source 1..18: mol_type = other DNA
gtaagttctgtccaagcc

SEQ ID NO: 11334 - DNA, 18 bp, synthetic construct
  misc_feature 1..18: note = Description of Artificial Sequence: Synthetic Antisense oligonucleotide
  modified_base 8: mod_base = OTHER; note = 5-methyl
  modified_base 12..13: mod_base = OTHER; note = 5-methyl
  modified_base 17..18: mod_base = OTHER; note = 5-methyl
  modified_base 13: mod_base = OTHER; note = bicyclic nucleic acid (BNA)
  modified_base 17: mod_base = OTHER; note = bicyclic nucleic acid (BNA)
  source 1..18: mol_type = other DNA
gtaagttctgtccaagcc

SEQ ID NO: 11335 - DNA, 18 bp, synthetic construct
  misc_feature 1..18: note = Description of Artificial Sequence: Synthetic Antisense oligonucleotide
  modified_base 8: mod_base = OTHER; note = 5-methyl
  modified_base 12..13: mod_base = OTHER; note = 5-methyl
  modified_base 17..18: mod_base = OTHER; note = 5-methyl
  modified_base 8: mod_base = OTHER; note = bicyclic nucleic acid (BNA)
  modified_base 12: mod_base = OTHER; note = bicyclic nucleic acid (BNA)
  source 1..18: mol_type = other DNA
gtaagttctgtccaagcc

SEQ ID NO: 11336 - DNA, 18 bp, synthetic construct
  misc_feature 1..18: note = Description of Artificial Sequence: Synthetic Antisense oligonucleotide
  modified_base 5: mod_base = OTHER; note = bicyclic nucleic acid (BNA)
  modified_base 10: mod_base = OTHER; note = bicyclic nucleic acid (BNA)
  modified_base 8: mod_base = OTHER; note = 5-methyl
  modified_base 12..13: mod_base = OTHER; note = 5-methyl
  modified_base 17..18: mod_base = OTHER; note = 5-methyl
  source 1..18: mol_type = other DNA
gtaagttctgtccaagcc

SEQ ID NO: 11337 - DNA, 18 bp, synthetic construct
  misc_feature 1..18: note = Description of Artificial Sequence: Synthetic Antisense oligonucleotide
  modified_base 8: mod_base = OTHER; note = 5-methyl
  modified_base 12..13: mod_base = OTHER; note = 5-methyl
  modified_base 17..18: mod_base = OTHER; note = 5-methyl
  modified_base 8: mod_base = OTHER; note = bicyclic nucleic acid (BNA)
  modified_base 16: mod_base = OTHER; note = bicyclic nucleic acid (BNA)
  source 1..18: mol_type = other DNA
gtaagttctgtccaagcc

SEQ ID NO: 11338 - DNA, 18 bp, synthetic construct
  misc_feature 1..18: note = Description of Artificial Sequence: Synthetic Antisense oligonucleotide
  modified_base 8: mod_base = OTHER; note = 5-methyl
  modified_base 12..13: mod_base = OTHER; note = 5-methyl
  modified_base 17..18: mod_base = OTHER; note = 5-methyl
  modified_base 10: mod_base = OTHER; note = bicyclic nucleic acid (BNA)
  modified_base 16: mod_base = OTHER; note = bicyclic nucleic acid (BNA)
  source 1..18: mol_type = other DNA
gtaagttctgtccaagcc

SEQ ID NO: 11339 - DNA, 18 bp, synthetic construct
  misc_feature 1..18: note = Description of Artificial Sequence: Synthetic Antisense oligonucleotide
  modified_base 8: mod_base = OTHER; note = 5-methyl
  modified_base 12..13: mod_base = OTHER; note = 5-methyl
  modified_base 17..18: mod_base = OTHER; note = 5-methyl
  modified_base 10: mod_base = OTHER; note = bicyclic nucleic acid (BNA)
  modified_base 12: mod_base = OTHER; note = bicyclic nucleic acid (BNA)
  source 1..18: mol_type = other DNA
gtaagttctgtccaagcc

SEQ ID NO: 11340 - DNA, 18 bp, synthetic construct
  misc_feature 1..18: note = Description of Artificial Sequence: Synthetic Antisense oligonucleotide
  modified_base 5: mod_base = OTHER; note = bicyclic nucleic acid (BNA)
  modified_base 17: mod_base = OTHER; note = bicyclic nucleic acid (BNA)
  modified_base 8: mod_base = OTHER; note = 5-methyl
  modified_base 12..13: mod_base = OTHER; note = 5-methyl
  modified_base 17..18: mod_base = OTHER; note = 5-methyl
  source 1..18: mol_type = other DNA
gtaagttctgtccaagcc

SEQ ID NO: 11341 - DNA, 18 bp, synthetic construct
  misc_feature 1..18: note = Description of Artificial Sequence: Synthetic Antisense oligonucleotide
  modified_base 8: mod_base = OTHER; note = 5-methyl
  modified_base 12..13: mod_base = OTHER; note = 5-methyl
  modified_base 17..18: mod_base = OTHER; note = 5-methyl
  modified_base 10: mod_base = OTHER; note = bicyclic nucleic acid (BNA)
  modified_base 17: mod_base = OTHER; note = bicyclic nucleic acid (BNA)
  source 1..18: mol_type = other DNA
gtaagttctgtccaagcc

SEQ ID NO: 11342 - DNA, 18 bp, synthetic construct
  misc_feature 1..18: note = Description of Artificial Sequence: Synthetic Antisense oligonucleotide
  modified_base 8: mod_base = OTHER; note = 5-methyl
  modified_base 12..13: mod_base = OTHER; note = 5-methyl
  modified_base 17..18: mod_base = OTHER; note = 5-methyl
  modified_base 12..13: mod_base = OTHER; note = bicyclic nucleic acid (BNA)
  source 1..18: mol_type = other DNA
gtaagttctgtccaagcc

SEQ ID NO: 11343 - DNA, 18 bp, synthetic construct
  misc_feature 1..18: note = Description of Artificial Sequence: Synthetic Antisense oligonucleotide
  modified_base 5: mod_base = OTHER; note = bicyclic nucleic acid (BNA)
  modified_base 12: mod_base = OTHER; note = bicyclic nucleic acid (BNA)
  modified_base 8: mod_base = OTHER; note = 5-methyl
  modified_base 12..13: mod_base = OTHER; note = 5-methyl
  modified_base 17..18: mod_base = OTHER; note = 5-methyl
  source 1..18: mol_type = other DNA
gtaagttctgtccaagcc

SEQ ID NO: 11344 - DNA, 18 bp, synthetic construct
  misc_feature 1..18: note = Description of Artificial Sequence: Synthetic Antisense oligonucleotide
  modified_base 8: mod_base = OTHER; note = 5-methyl
  modified_base 12..13: mod_base = OTHER; note = 5-methyl
  modified_base 17..18: mod_base = OTHER; note = 5-methyl
  modified_base 8: mod_base = OTHER; note = bicyclic nucleic acid (BNA)
  modified_base 10: mod_base = OTHER; note = bicyclic nucleic acid (BNA)
  source 1..18: mol_type = other DNA
gtaagttctgtccaagcc

SEQ ID NO: 11345 - DNA, 18 bp, synthetic construct
  misc_feature 1..18: note = Description of Artificial Sequence: Synthetic Antisense oligonucleotide
  modified_base 8: mod_base = OTHER; note = 5-methyl
  modified_base 12..13: mod_base = OTHER; note = 5-methyl
  modified_base 17..18: mod_base = OTHER; note = 5-methyl
  modified_base 13: mod_base = OTHER; note = bicyclic nucleic acid (BNA)
  modified_base 16: mod_base = OTHER; note = bicyclic nucleic acid (BNA)
  source 1..18: mol_type = other DNA
gtaagttctgtccaagcc

SEQ ID NO: 11346 - DNA, 18 bp, synthetic construct
  misc_feature 1..18: note = Description of Artificial Sequence: Synthetic Antisense oligonucleotide
  modified_base 5: mod_base = OTHER; note = bicyclic nucleic acid (BNA)
  modified_base 16: mod_base = OTHER; note = bicyclic nucleic acid (BNA)
  modified_base 8: mod_base = OTHER; note = 5-methyl
  modified_base 12..13: mod_base = OTHER; note = 5-methyl
  modified_base 17..18: mod_base = OTHER; note = 5-methyl
  source 1..18: mol_type = other DNA
gtaagttctgtccaagcc

SEQ ID NO: 11347 - DNA, 18 bp, synthetic construct
  misc_feature 1..18: note = Description of Artificial Sequence: Synthetic Antisense oligonucleotide
  modified_base 8: mod_base = OTHER; note = 5-methyl
  modified_base 12..13: mod_base = OTHER; note = 5-methyl
  modified_base 17..18: mod_base = OTHER; note = 5-methyl
  modified_base 12: mod_base = OTHER; note = bicyclic nucleic acid (BNA)
  modified_base 16: mod_base = OTHER; note = bicyclic nucleic acid (BNA)
  source 1..18: mol_type = other DNA
gtaagttctgtccaagcc

SEQ ID NO: 11348 - DNA, 18 bp, synthetic construct
  misc_feature 1..18: note = Description of Artificial Sequence: Synthetic Antisense oligonucleotide
  modified_base 8: mod_base = OTHER; note = 5-methyl
  modified_base 12..13: mod_base = OTHER; note = 5-methyl
  modified_base 17..18: mod_base = OTHER; note = 5-methyl
  modified_base 16..17: mod_base = OTHER; note = bicyclic nucleic acid (BNA)
  source 1..18: mol_type = other DNA
gtaagttctgtccaagcc

SEQ ID NO: 11349 - DNA, 18 bp, synthetic construct
  misc_feature 1..18: note = Description of Artificial Sequence: Synthetic Antisense oligonucleotide
  modified_base 8: mod_base = OTHER; note = 5-methyl
  modified_base 12..13: mod_base = OTHER; note = 5-methyl
  modified_base 17..18: mod_base = OTHER; note = 5-methyl
  modified_base 10: mod_base = OTHER; note = bicyclic nucleic acid (BNA)
  modified_base 13: mod_base = OTHER; note = bicyclic nucleic acid (BNA)
  source 1..18: mol_type = other DNA
gtaagttctgtccaagcc

SEQ ID NO: 11350 - DNA, 18 bp, synthetic construct
  misc_feature 1..18: note = Description of Artificial Sequence: Synthetic Antisense oligonucleotide
  modified_base 4: mod_base = OTHER; note = 5-methyl
  modified_base 13: mod_base = OTHER; note = 5-methyl
  modified_base 17..18: mod_base = OTHER; note = 5-methyl
  modified_base 6: mod_base = OTHER; note = bicyclic nucleic acid (BNA)
  modified_base 10: mod_base = OTHER; note = bicyclic nucleic acid (BNA)
  source 1..18: mol_type = other DNA
agtcggtaagttctgtcc

SEQ ID NO: 11351 - DNA, 18 bp, synthetic construct
  misc_feature 1..18: note = Description of Artificial Sequence: Synthetic Antisense oligonucleotide
  modified_base 2: mod_base = OTHER; note = bicyclic nucleic acid (BNA)
  modified_base 4: mod_base = OTHER; note = bicyclic nucleic acid (BNA)
  modified_base 4: mod_base = OTHER; note = 5-methyl
  modified_base 13: mod_base = OTHER; note = 5-methyl
  modified_base 17..18: mod_base = OTHER; note = 5-methyl
  source 1..18: mol_type = other DNA
agtcggtaagttctgtcc

SEQ ID NO: 11352 - DNA, 18 bp, synthetic construct
  misc_feature 1..18: note = Description of Artificial Sequence: Synthetic Antisense oligonucleotide
  modified_base 4: mod_base = OTHER; note = 5-methyl
  modified_base 13: mod_base = OTHER; note = 5-methyl
  modified_base 17..18: mod_base = OTHER; note = 5-methyl
  modified_base 5: mod_base = OTHER; note = bicyclic nucleic acid (BNA)
  modified_base 13: mod_base = OTHER; note = bicyclic nucleic acid (BNA)
  source 1..18: mol_type = other DNA
agtcggtaagttctgtcc

SEQ ID NO: 11353 - DNA, 18 bp, synthetic construct
  misc_feature 1..18: note = Description of Artificial Sequence: Synthetic Antisense oligonucleotide
  modified_base 4: mod_base = OTHER; note = 5-methyl
  modified_base 13: mod_base = OTHER; note = 5-methyl
  modified_base 17..18: mod_base = OTHER; note = 5-methyl
  modified_base 13: mod_base = OTHER; note = bicyclic nucleic acid (BNA)
  modified_base 17: mod_base = OTHER; note = bicyclic nucleic acid (BNA)
  source 1..18: mol_type = other DNA
agtcggtaagttctgtcc

SEQ ID NO: 11354 - DNA, 18 bp, synthetic construct
  misc_feature 1..18: note = Description of Artificial Sequence: Synthetic Antisense oligonucleotide
  modified_base 4: mod_base = OTHER; note = 5-methyl
  modified_base 13: mod_base = OTHER; note = 5-methyl
  modified_base 17..18: mod_base = OTHER; note = 5-methyl
  modified_base 4: mod_base = OTHER; note = bicyclic nucleic acid (BNA)
  modified_base 15: mod_base = OTHER; note = bicyclic nucleic acid (BNA)
  source 1..18: mol_type = other DNA
agtcggtaagttctgtcc

SEQ ID NO: 11355 - DNA, 18 bp, synthetic construct
  misc_feature 1..18: note = Description of Artificial Sequence: Synthetic Antisense oligonucleotide
  modified_base 4: mod_base = OTHER; note = 5-methyl
  modified_base 13: mod_base = OTHER; note = 5-methyl
  modified_base 17..18: mod_base = OTHER; note = 5-methyl
  modified_base 5: mod_base = OTHER; note = bicyclic nucleic acid (BNA)
  modified_base 10: mod_base = OTHER; note = bicyclic nucleic acid (BNA)
  source 1..18: mol_type = other DNA
agtcggtaagttctgtcc

SEQ ID NO: 11356 - DNA, 18 bp, synthetic construct
  misc_feature 1..18: note = Description of Artificial Sequence: Synthetic Antisense oligonucleotide
  modified_base 2: mod_base = OTHER; note = bicyclic nucleic acid (BNA)
  modified_base 17: mod_base = OTHER; note = bicyclic nucleic acid (BNA)
  modified_base 4: mod_base = OTHER; note = 5-methyl
  modified_base 13: mod_base = OTHER; note = 5-methyl
  modified_base 17..18: mod_base = OTHER; note = 5-methyl
  source 1..18: mol_type = other DNA
agtcggtaagttctgtcc

SEQ ID NO: 11357 - DNA, 18 bp, synthetic construct
  misc_feature 1..18: note = Description of Artificial Sequence: Synthetic Antisense oligonucleotide
  modified_base 4: mod_base = OTHER; note = 5-methyl
  modified_base 13: mod_base = OTHER; note = 5-methyl
  modified_base 17..18: mod_base = OTHER; note = 5-methyl
  modified_base 6: mod_base = OTHER; note = bicyclic nucleic acid (BNA)
  modified_base 13: mod_base = OTHER; note = bicyclic nucleic acid (BNA)
  source 1..18: mol_type = other DNA
agtcggtaagttctgtcc

SEQ ID NO: 11358 - DNA, 18 bp, synthetic construct
  misc_feature 1..18: note = Description of Artificial Sequence: Synthetic Antisense oligonucleotide
  modified_base 2: mod_base = OTHER; note = bicyclic nucleic acid (BNA)
  modified_base 15: mod_base = OTHER; note = bicyclic nucleic acid (BNA)
  modified_base 4: mod_base = OTHER; note = 5-methyl
  modified_base 13: mod_base = OTHER; note = 5-methyl
  modified_base 17..18: mod_base = OTHER; note = 5-methyl
  source 1..18: mol_type = other DNA
agtcggtaagttctgtcc

SEQ ID NO: 11359 - DNA, 18 bp, synthetic construct
  misc_feature 1..18: note = Description of Artificial Sequence: Synthetic Antisense oligonucleotide
  modified_base 2: mod_base = OTHER; note = bicyclic nucleic acid (BNA)
  modified_base 6: mod_base = OTHER; note = bicyclic nucleic acid (BNA)
  modified_base 4: mod_base = OTHER; note = 5-methyl
  modified_base 13: mod_base = OTHER; note = 5-methyl
  modified_base 17..18: mod_base = OTHER; note = 5-methyl
  source 1..18: mol_type = other DNA
agtcggtaagttctgtcc

SEQ ID NO: 11360 - DNA, 18 bp, synthetic construct
  misc_feature 1..18: note = Description of Artificial Sequence: Synthetic Antisense oligonucleotide
  modified_base 4: mod_base = OTHER; note = 5-methyl
  modified_base 13: mod_base = OTHER; note = 5-methyl
  modified_base 17..18: mod_base = OTHER; note = 5-methyl
  modified_base 4: mod_base = OTHER; note = bicyclic nucleic acid (BNA)
  modified_base 17: mod_base = OTHER; note = bicyclic nucleic acid (BNA)
  source 1..18: mol_type = other DNA
agtcggtaagttctgtcc

SEQ ID NO: 11361 - DNA, 18 bp, synthetic construct
  misc_feature 1..18: note = Description of Artificial Sequence: Synthetic Antisense oligonucleotide
  modified_base 4: mod_base = OTHER; note = 5-methyl
  modified_base 13: mod_base = OTHER; note = 5-methyl
  modified_base 17..18: mod_base = OTHER; note = 5-methyl
  modified_base 10: mod_base = OTHER; note = bicyclic nucleic acid (BNA)
  modified_base 15: mod_base = OTHER; note = bicyclic nucleic acid (BNA)
  source 1..18: mol_type = other DNA
agtcggtaagttctgtcc

SEQ ID NO: 11362 - DNA, 18 bp, synthetic construct
  misc_feature 1..18: note = Description of Artificial Sequence: Synthetic Antisense oligonucleotide
  modified_base 4: mod_base = OTHER; note = 5-methyl
  modified_base 13: mod_base = OTHER; note = 5-methyl
  modified_base 17..18: mod_base = OTHER; note = 5-methyl
  modified_base 13: mod_base = OTHER; note = bicyclic nucleic acid (BNA)
  modified_base 15: mod_base = OTHER; note = bicyclic nucleic acid (BNA)
  source 1..18: mol_type = other DNA
agtcggtaagttctgtcc

SEQ ID NO: 11363 - DNA, 18 bp, synthetic construct
  misc_feature 1..18: note = Description of Artificial Sequence: Synthetic Antisense oligonucleotide
  modified_base 4: mod_base = OTHER; note = 5-methyl
  modified_base 13: mod_base = OTHER; note = 5-methyl
  modified_base 17..18: mod_base = OTHER; note = 5-methyl
  modified_base 5..6: mod_base = OTHER; note = bicyclic nucleic acid (BNA)
  source 1..18: mol_type = other DNA
agtcggtaagttctgtcc

SEQ ID NO: 11364 - DNA, 18 bp, synthetic construct
  misc_feature 1..18: note = Description of Artificial Sequence: Synthetic Antisense oligonucleotide
  modified_base 4: mod_base = OTHER; note = 5-methyl
  modified_base 13: mod_base = OTHER; note = 5-methyl
  modified_base 17..18: mod_base = OTHER; note = 5-methyl
  modified_base 5: mod_base = OTHER; note = bicyclic nucleic acid (BNA)
  modified_base 15: mod_base = OTHER; note = bicyclic nucleic acid (BNA)
  source 1..18: mol_type = other DNA
agtcggtaagttctgtcc

SEQ ID NO: 11365 - DNA, 18 bp, synthetic construct
  misc_feature 1..18: note = Description of Artificial Sequence: Synthetic Antisense oligonucleotide
  modified_base 2: mod_base = OTHER; note = bicyclic nucleic acid (BNA)
  modified_base 5: mod_base = OTHER; note = bicyclic nucleic acid (BNA)
  modified_base 4: mod_base = OTHER; note = 5-methyl
  modified_base 13: mod_base = OTHER; note = 5-methyl
  modified_base 17..18: mod_base = OTHER; note = 5-methyl
  source 1..18: mol_type = other DNA
agtcggtaagttctgtcc

SEQ ID NO: 11366 - DNA, 18 bp, synthetic construct
  misc_feature 1..18: note = Description of Artificial Sequence: Synthetic Antisense oligonucleotide
  modified_base 4: mod_base = OTHER; note = 5-methyl
  modified_base 13: mod_base = OTHER; note = 5-methyl
  modified_base 17..18: mod_base = OTHER; note = 5-methyl
  modified_base 5: mod_base = OTHER; note = bicyclic nucleic acid (BNA)
  modified_base 17: mod_base = OTHER; note = bicyclic nucleic acid (BNA)
  source 1..18: mol_type = other DNA
agtcggtaagttctgtcc

SEQ ID NO: 11367 - DNA, 18 bp, synthetic construct
  misc_feature 1..18: note = Description of Artificial Sequence: Synthetic Antisense oligonucleotide
  modified_base 4: mod_base = OTHER; note = 5-methyl
  modified_base 13: mod_base = OTHER; note = 5-methyl
  modified_base 17..18: mod_base = OTHER; note = 5-methyl
  modified_base 10: mod_base = OTHER; note = bicyclic nucleic acid (BNA)
  modified_base 17: mod_base = OTHER; note = bicyclic nucleic acid (BNA)
  source 1..18: mol_type = other DNA
agtcggtaagttctgtcc

SEQ ID NO: 11368 - DNA, 18 bp, synthetic construct
  misc_feature 1..18: note = Description of Artificial Sequence: Synthetic Antisense oligonucleotide
  modified_base 4: mod_base = OTHER; note = 5-methyl
  modified_base 13: mod_base = OTHER; note = 5-methyl
  modified_base 17..18: mod_base = OTHER; note = 5-methyl
  modified_base 4: mod_base = OTHER; note = bicyclic nucleic acid (BNA)
  modified_base 10: mod_base = OTHER; note = bicyclic nucleic acid (BNA)
  source 1..18: mol_type = other DNA
agtcggtaagttctgtcc

SEQ ID NO: 11369 - DNA, 18 bp, synthetic construct
  misc_feature 1..18: note = Description of Artificial Sequence: Synthetic Antisense oligonucleotide
  modified_base 2: mod_base = OTHER; note = bicyclic nucleic acid (BNA)
  modified_base 10: mod_base = OTHER; note = bicyclic nucleic acid (BNA)
  modified_base 4: mod_base = OTHER; note = 5-methyl
  modified_base 13: mod_base = OTHER; note = 5-methyl
  modified_base 17..18: mod_base = OTHER; note = 5-methyl
  source 1..18: mol_type = other DNA
agtcggtaagttctgtcc

SEQ ID NO: 11370 - DNA, 18 bp, synthetic construct
  misc_feature 1..18: note = Description of Artificial Sequence: Synthetic Antisense oligonucleotide
  modified_base 4: mod_base = OTHER; note = 5-methyl
  modified_base 13: mod_base = OTHER; note = 5-methyl
  modified_base 17..18: mod_base = OTHER; note = 5-methyl
  modified_base 4: mod_base = OTHER; note = bicyclic nucleic acid (BNA)
  modified_base 6: mod_base = OTHER; note = bicyclic nucleic acid (BNA)
  source 1..18: mol_type = other DNA
agtcggtaagttctgtcc

SEQ ID NO: 11371 - DNA, 18 bp, synthetic construct
  misc_feature 1..18: note = Description of Artificial Sequence: Synthetic Antisense oligonucleotide
  modified_base 4: mod_base = OTHER; note = 5-methyl
  modified_base 13: mod_base = OTHER; note = 5-methyl
  modified_base 17..18: mod_base = OTHER; note = 5-methyl
  modified_base 4: mod_base = OTHER; note = bicyclic nucleic acid (BNA)
  modified_base 13: mod_base = OTHER; note = bicyclic nucleic acid (BNA)
  source 1..18: mol_type = other DNA
agtcggtaagttctgtcc

SEQ ID NO: 11372 - DNA, 18 bp, synthetic construct
  misc_feature 1..18: note = Description of Artificial Sequence: Synthetic Antisense oligonucleotide
  modified_base 4: mod_base = OTHER; note = 5-methyl
  modified_base 13: mod_base = OTHER; note = 5-methyl
  modified_base 17..18: mod_base = OTHER; note = 5-methyl
  modified_base 15: mod_base = OTHER; note = bicyclic nucleic acid (BNA)
  modified_base 17: mod_base = OTHER; note = bicyclic nucleic acid (BNA)
  source 1..18: mol_type = other DNA
agtcggtaagttctgtcc

SEQ ID NO: 11373 - DNA, 18 bp, synthetic construct
  misc_feature 1..18: note = Description of Artificial Sequence: Synthetic Antisense oligonucleotide
  modified_base 2: mod_base = OTHER; note = bicyclic nucleic acid (BNA)
  modified_base 13: mod_base = OTHER; note = bicyclic nucleic acid (BNA)
  modified_base 4: mod_base = OTHER; note = 5-methyl
  modified_base 13: mod_base = OTHER; note = 5-methyl
  modified_base 17..18: mod_base = OTHER; note = 5-methyl
  source 1..18: mol_type = other DNA
agtcggtaagttctgtcc

SEQ ID NO: 11374 - DNA, 18 bp, synthetic construct
  misc_feature 1..18: note = Description of Artificial Sequence: Synthetic Antisense oligonucleotide
  modified_base 4: mod_base = OTHER; note = 5-methyl
  modified_base 13: mod_base = OTHER; note = 5-methyl
  modified_base 17..18: mod_base = OTHER; note = 5-methyl
  modified_base 6: mod_base = OTHER; note = bicyclic nucleic acid (BNA)
  modified_base 17: mod_base = OTHER; note = bicyclic nucleic acid (BNA)
  source 1..18: mol_type = other DNA
agtcggtaagttctgtcc

SEQ ID NO: 11375 - DNA, 18 bp, synthetic construct
  misc_feature 1..18: note = Description of Artificial Sequence: Synthetic Antisense oligonucleotide
  modified_base 4: mod_base = OTHER; note = 5-methyl
  modified_base 13: mod_base = OTHER; note = 5-methyl
  modified_base 17..18: mod_base = OTHER; note = 5-methyl
  modified_base 6: mod_base = OTHER; note = bicyclic nucleic acid (BNA)
  modified_base 15: mod_base = OTHER; note = bicyclic nucleic acid (BNA)
  source 1..18: mol_type = other DNA
agtcggtaagttctgtcc

SEQ ID NO: 11376 - DNA, 18 bp, synthetic construct
  misc_feature 1..18: note = Description of Artificial Sequence: Synthetic Antisense oligonucleotide
  modified_base 4: mod_base = OTHER; note = 5-methyl
  modified_base 13: mod_base = OTHER; note = 5-methyl
  modified_base 17..18: mod_base = OTHER; note = 5-methyl
  modified_base 4..5: mod_base = OTHER; note = bicyclic nucleic acid (BNA)
  source 1..18: mol_type = other DNA
agtcggtaagttctgtcc

SEQ ID NO: 11377 - DNA, 18 bp, synthetic construct
  misc_feature 1..18: note = Description of Artificial Sequence: Synthetic Antisense oligonucleotide
  modified_base 4: mod_base = OTHER; note = 5-methyl
  modified_base 13: mod_base = OTHER; note = 5-methyl
  modified_base 17..18: mod_base = OTHER; note = 5-methyl
  modified_base 10: mod_base = OTHER; note = bicyclic nucleic acid (BNA)
  modified_base 13: mod_base = OTHER; note = bicyclic nucleic acid (BNA)
  source 1..18: mol_type = other DNA
agtcggtaagttctgtcc

SEQ ID NO: 11378 - DNA, 18 bp, synthetic construct
  misc_feature 1..18: note = Description of Artificial Sequence: Synthetic Antisense oligonucleotide
  modified_base 1: mod_base = OTHER; note = 5-methyl
  modified_base 5..6: mod_base = OTHER; note = 5-methyl
  modified_base 10..12: mod_base = OTHER; note = 5-methyl
  modified_base 12: mod_base = OTHER; note = bicyclic nucleic acid (BNA)
  modified_base 17: mod_base = OTHER; note = bicyclic nucleic acid (BNA)
  source 1..18: mol_type = other DNA
ctgtccaagcccggttga

SEQ ID NO: 11379 - DNA, 18 bp, synthetic construct
  misc_feature 1..18: note = Description of Artificial Sequence: Synthetic Antisense oligonucleotide
  modified_base 1: mod_base = OTHER; note = 5-methyl
  modified_base 5..6: mod_base = OTHER; note = 5-methyl
  modified_base 10..12: mod_base = OTHER; note = 5-methyl
  modified_base 6: mod_base = OTHER; note = bicyclic nucleic acid (BNA)
  modified_base 10: mod_base = OTHER; note = bicyclic nucleic acid (BNA)
  source 1..18: mol_type = other DNA
ctgtccaagcccggttga

SEQ ID NO: 11380 - DNA, 18 bp, synthetic construct
  misc_feature 1..18: note = Description of Artificial Sequence: Synthetic Antisense oligonucleotide
  modified_base 1: mod_base = OTHER; note = 5-methyl
  modified_base 5..6: mod_base = OTHER; note = 5-methyl
  modified_base 10..12: mod_base = OTHER; note = 5-methyl
  modified_base 9: mod_base = OTHER; note = bicyclic nucleic acid (BNA)
  modified_base 14: mod_base = OTHER; note = bicyclic nucleic acid (BNA)
  source 1..18: mol_type = other DNA
ctgtccaagcccggttga

SEQ ID NO: 11381 - DNA, 18 bp, synthetic construct
  misc_feature 1..18: note = Description of Artificial Sequence: Synthetic Antisense oligonucleotide
  modified_base 1: mod_base = OTHER; note = 5-methyl
  modified_base 5..6: mod_base = OTHER; note = 5-methyl
  modified_base 10..12: mod_base = OTHER; note = 5-methyl
  modified_base 11..12: mod_base = OTHER; note = bicyclic nucleic acid (BNA)
  source 1..18: mol_type = other DNA
ctgtccaagcccggttga

SEQ ID NO: 11382 - DNA, 18 bp, synthetic construct
  misc_feature 1..18: note = Description of Artificial Sequence: Synthetic Antisense oligonucleotide
  modified_base 1: mod_base = OTHER; note = 5-methyl
  modified_base 5..6: mod_base = OTHER; note = 5-methyl
  modified_base 10..12: mod_base = OTHER; note = 5-methyl
  modified_base 5: mod_base = OTHER; note = bicyclic nucleic acid (BNA)
  modified_base 9: mod_base = OTHER; note = bicyclic nucleic acid (BNA)
  source 1..18: mol_type = other DNA
ctgtccaagcccggttga

SEQ ID NO: 11383 - DNA, 18 bp, synthetic construct
  misc_feature 1..18: note = Description of Artificial Sequence: Synthetic Antisense oligonucleotide
  modified_base 1: mod_base = OTHER; note = 5-methyl
  modified_base 5..6: mod_base = OTHER; note = 5-methyl
  modified_base 10..12: mod_base = OTHER; note = 5-methyl
  modified_base 3: mod_base = OTHER; note = bicyclic nucleic acid (BNA)
  modified_base 9: mod_base = OTHER; note = bicyclic nucleic acid (BNA)
  source 1..18: mol_type = other DNA
ctgtccaagcccggttga

SEQ ID NO: 11384 - DNA, 18 bp, synthetic construct
  misc_feature 1..18: note = Description of Artificial Sequence: Synthetic Antisense oligonucleotide
  modified_base 1: mod_base = OTHER; note = 5-methyl
  modified_base 5..6: mod_base = OTHER; note = 5-methyl
  modified_base 10..12: mod_base = OTHER; note = 5-methyl
  modified_base 6: mod_base = OTHER; note = bicyclic nucleic acid (BNA)
  modified_base 14: mod_base = OTHER; note = bicyclic nucleic acid (BNA)
  source 1..18: mol_type = other DNA
ctgtccaagcccggttga

SEQ ID NO: 11385 - DNA, 18 bp, synthetic construct
  misc_feature 1..18: note = Description of Artificial Sequence: Synthetic Antisense oligonucleotide
  modified_base 1: mod_base = OTHER; note = 5-methyl
  modified_base 5..6: mod_base = OTHER; note = 5-methyl
  modified_base 10..12: mod_base = OTHER; note = 5-methyl
  modified_base 9..10: mod_base = OTHER; note = bicyclic nucleic acid (BNA)
  source 1..18: mol_type = other DNA
ctgtccaagcccggttga

SEQ ID NO: 11386 - DNA, 18 bp, synthetic construct
  misc_feature 1..18: note = Description of Artificial Sequence: Synthetic Antisense oligonucleotide
  modified_base 1: mod_base = OTHER; note = 5-methyl
  modified_base 5..6: mod_base = OTHER; note = 5-methyl
  modified_base 10..12: mod_base = OTHER; note = 5-methyl
  modified_base 5: mod_base = OTHER; note = bicyclic nucleic acid (BNA)
  modified_base 13: mod_base = OTHER; note = bicyclic nucleic acid (BNA)
  source 1..18: mol_type = other DNA
ctgtccaagcccggttga

SEQ ID NO: 11387 - DNA, 18 bp, synthetic construct
  misc_feature 1..18: note = Description of Artificial Sequence: Synthetic Antisense oligonucleotide
  modified_base 1: mod_base = OTHER; note = 5-methyl
  modified_base 5..6: mod_base = OTHER; note = 5-methyl
  modified_base 10..12: mod_base = OTHER; note = 5-methyl
  modified_base 3: mod_base = OTHER; note = bicyclic nucleic acid (BNA)
  modified_base 13: mod_base = OTHER; note = bicyclic nucleic acid (BNA)
  source 1..18: mol_type = other DNA
ctgtccaagcccggttga

SEQ ID NO: 11388 - DNA, 18 bp, synthetic construct
  misc_feature 1..18: note = Description of Artificial Sequence: Synthetic Antisense oligonucleotide
  modified_base 1: mod_base = OTHER; note = 5-methyl
  modified_base 5..6: mod_base = OTHER; note = 5-methyl
  modified_base 10..12: mod_base = OTHER; note = 5-methyl
  modified_base 13: mod_base = OTHER; note = bicyclic nucleic acid (BNA)
  modified_base 17: mod_base = OTHER; note = bicyclic nucleic acid (BNA)
  source 1..18: mol_type = other DNA
ctgtccaagcccggttga

SEQ ID NO: 11389 - DNA, 18 bp, synthetic construct
  misc_feature 1..18: note = Description of Artificial Sequence: Synthetic Antisense oligonucleotide
  modified_base 1: mod_base = OTHER; note = 5-methyl
  modified_base 5..6: mod_base = OTHER; note = 5-methyl
  modified_base 10..12: mod_base = OTHER; note = 5-methyl
  modified_base 3: mod_base = OTHER; note = bicyclic nucleic acid (BNA)
  modified_base 6: mod_base = OTHER; note = bicyclic nucleic acid (BNA)
  source 1..18: mol_type = other DNA
ctgtccaagcccggttga

SEQ ID NO: 11390 - DNA, 18 bp, synthetic construct
  misc_feature 1..18: note = Description of Artificial Sequence: Synthetic Antisense oligonucleotide
  modified_base 1: mod_base = OTHER; note = 5-methyl
  modified_base 5..6: mod_base = OTHER; note = 5-methyl
  modified_base 10..12: mod_base = OTHER; note = 5-methyl
  modified_base 6: mod_base = OTHER; note = bicyclic nucleic acid (BNA)
  modified_base 9: mod_base = OTHER; note = bicyclic nucleic acid (BNA)
  source 1..18: mol_type = other DNA
ctgtccaagcccggttga

SEQ ID NO: 11391 - DNA, 18 bp, synthetic construct
  misc_feature 1..18: note = Description of Artificial Sequence: Synthetic Antisense oligonucleotide
  modified_base 1: mod_base = OTHER; note = 5-methyl
  modified_base 5..6: mod_base = OTHER; note = 5-methyl
  modified_base 10..12: mod_base = OTHER; note = 5-methyl
  modified_base 5: mod_base = OTHER; note = bicyclic nucleic acid (BNA)
  modified_base 10: mod_base = OTHER; note = bicyclic nucleic acid (BNA)
  source 1..18: mol_type = other DNA
ctgtccaagcccggttga

SEQ ID NO: 11392 - DNA, 18 bp, synthetic construct
  misc_feature 1..18: note = Description of Artificial Sequence: Synthetic Antisense oligonucleotide
  modified_base 1: mod_base = OTHER; note = 5-methyl
  modified_base 5..6: mod_base = OTHER; note = 5-methyl
  modified_base 10..12: mod_base = OTHER; note = 5-methyl
  modified_base 3: mod_base = OTHER; note = bicyclic nucleic acid (BNA)
  modified_base 10: mod_base = OTHER; note = bicyclic nucleic acid (BNA)
  source 1..18: mol_type = other DNA
ctgtccaagcccggttga

SEQ ID NO: 11393 - DNA, 18 bp, synthetic construct
  misc_feature 1..18: note = Description of Artificial Sequence: Synthetic Antisense oligonucleotide
  modified_base 1: mod_base = OTHER; note = 5-methyl
  modified_base 5..6: mod_base = OTHER; note = 5-methyl
  modified_base 10..12: mod_base = OTHER; note = 5-methyl
  modified_base 13..14: mod_base = OTHER; note = bicyclic nucleic acid (BNA)
  source 1..18: mol_type = other DNA
ctgtccaagcccggttga

SEQ ID NO: 11394 - DNA, 18 bp, synthetic construct
  misc_feature 1..18: note = Description of Artificial Sequence: Synthetic Antisense oligonucleotide
  modified_base 1: mod_base = OTHER; note = 5-methyl
  modified_base 5..6: mod_base = OTHER; note = 5-methyl
  modified_base 10..12: mod_base = OTHER; note = 5-methyl
  modified_base 6: mod_base = OTHER; note = bicyclic nucleic acid (BNA)
  modified_base 13: mod_base = OTHER; note = bicyclic nucleic acid (BNA)
  source 1..18: mol_type = other DNA
ctgtccaagcccggttga

SEQ ID NO: 11395 - DNA, 18 bp, synthetic construct
  misc_feature 1..18: note = Description of Artificial Sequence: Synthetic Antisense oligonucleotide
  modified_base 1: mod_base = OTHER; note = 5-methyl
  modified_base 5..6: mod_base = OTHER; note = 5-methyl
  modified_base 10..12: mod_base = OTHER; note = 5-methyl
  modified_base 9: mod_base = OTHER; note = bicyclic nucleic acid (BNA)
  modified_base 11: mod_base = OTHER; note = bicyclic nucleic acid (BNA)
  source 1..18: mol_type = other DNA
ctgtccaagcccggttga

SEQ ID NO: 11396 - DNA, 18 bp, synthetic construct
  misc_feature 1..18: note = Description of Artificial Sequence: Synthetic Antisense oligonucleotide
  modified_base 1: mod_base = OTHER; note = 5-methyl
  modified_base 5..6: mod_base = OTHER; note = 5-methyl
  modified_base 10..12: mod_base = OTHER; note = 5-methyl
  modified_base 14: mod_base = OTHER; note = bicyclic nucleic acid (BNA)
  modified_base 17: mod_base = OTHER; note = bicyclic nucleic acid (BNA)
  source 1..18: mol_type = other DNA
ctgtccaagcccggttga

SEQ ID NO: 11397 - DNA, 18 bp, synthetic construct
  misc_feature 1..18: note = Description of Artificial Sequence: Synthetic Antisense oligonucleotide
  modified_base 1: mod_base = OTHER; note = 5-methyl
  modified_base 5..6: mod_base = OTHER; note = 5-methyl
  modified_base 10..12: mod_base = OTHER; note = 5-methyl
  modified_base 11: mod_base = OTHER; note = bicyclic nucleic acid (BNA)
  modified_base 13: mod_base = OTHER; note = bicyclic nucleic acid (BNA)
  source 1..18: mol_type = other DNA
ctgtccaagcccggttga

SEQ ID NO: 11398 - DNA, 18 bp, synthetic construct
  misc_feature 1..18: note = Description of Artificial Sequence: Synthetic Antisense oligonucleotide
  modified_base 1: mod_base = OTHER; note = 5-methyl
  modified_base 5..6: mod_base = OTHER; note = 5-methyl
  modified_base 10..12: mod_base = OTHER; note = 5-methyl
  modified_base 5: mod_base = OTHER; note = bicyclic nucleic acid (BNA)
  modified_base 14: mod_base = OTHER; note = bicyclic nucleic acid (BNA)
  source 1..18: mol_type = other DNA
ctgtccaagcccggttga

SEQ ID NO: 11399 - DNA, 18 bp, synthetic construct
  misc_feature 1..18: note = Description of Artificial Sequence: Synthetic Antisense oligonucleotide
  modified_base 1: mod_base = OTHER; note = 5-methyl
  modified_base 5..6: mod_base = OTHER; note = 5-methyl
  modified_base 10..12: mod_base = OTHER; note = 5-methyl
  modified_base 3: mod_base = OTHER; note = bicyclic nucleic acid (BNA)
  modified_base 14: mod_base = OTHER; note = bicyclic nucleic acid (BNA)
  source 1..18: mol_type = other DNA
ctgtccaagcccggttga

SEQ ID NO: 11400 - DNA, 18 bp, synthetic construct
  misc_feature 1..18: note = Description of Artificial Sequence: Synthetic Antisense oligonucleotide
  modified_base 1: mod_base = OTHER; note = 5-methyl
  modified_base 5..6: mod_base = OTHER; note = 5-methyl
  modified_base 10..12: mod_base = OTHER; note = 5-methyl
  modified_base 10: mod_base = OTHER; note = bicyclic nucleic acid (BNA)
  modified_base 12: mod_base = OTHER; note = bicyclic nucleic acid (BNA)
  source 1..18: mol_type = other DNA
ctgtccaagcccggttga

SEQ ID NO: 11401 - DNA, 18 bp, synthetic construct
  misc_feature 1..18: note = Description of Artificial Sequence: Synthetic Antisense oligonucleotide
  modified_base 1: mod_base = OTHER; note = 5-methyl
  modified_base 5..6: mod_base = OTHER; note = 5-methyl
  modified_base 10..12: mod_base = OTHER; note = 5-methyl
  modified_base 9: mod_base = OTHER; note = bicyclic nucleic acid (BNA)
  modified_base 17: mod_base = OTHER; note = bicyclic nucleic acid (BNA)
  source 1..18: mol_type = other DNA
ctgtccaagcccggttga

SEQ ID NO: 11402 - DNA, 18 bp, synthetic construct
  misc_feature 1..18: note = Description of Artificial Sequence: Synthetic Antisense oligonucleotide
  modified_base 1: mod_base = OTHER; note = 5-methyl
  modified_base 5..6: mod_base = OTHER; note = 5-methyl
  modified_base 10..12: mod_base = OTHER; note = 5-methyl
  modified_base 12: mod_base = OTHER; note = bicyclic nucleic acid (BNA)
  modified_base 14: mod_base = OTHER; note = bicyclic nucleic acid (BNA)
  source 1..18: mol_type = other DNA
ctgtccaagcccggttga

SEQ ID NO: 11403 - DNA, 18 bp, synthetic construct
  misc_feature 1..18: note = Description of Artificial Sequence: Synthetic Antisense oligonucleotide
  modified_base 1: mod_base = OTHER; note = 5-methyl
  modified_base 5..6: mod_base = OTHER; note = 5-methyl
  modified_base 10..12: mod_base = OTHER; note = 5-methyl
  modified_base 5: mod_base = OTHER; note = bicyclic nucleic acid (BNA)
  modified_base 11: mod_base = OTHER; note = bicyclic nucleic acid (BNA)
  source 1..18: mol_type = other DNA
ctgtccaagcccggttga

SEQ ID NO: 11404 - DNA, 18 bp, synthetic construct
  misc_feature 1..18: note = Description of Artificial Sequence: Synthetic Antisense oligonucleotide
  modified_base 1: mod_base = OTHER; note = 5-methyl
  modified_base 5..6: mod_base = OTHER; note = 5-methyl
  modified_base 10..12: mod_base = OTHER; note = 5-methyl
  modified_base 3: mod_base = OTHER; note = bicyclic nucleic acid (BNA)
  modified_base 17: mod_base = OTHER; note = bicyclic nucleic acid (BNA)
  source 1..18: mol_type = other DNA
ctgtccaagcccggttga

SEQ ID NO: 11405 - DNA, 18 bp, synthetic construct
  misc_feature 1..18: note = Description of Artificial Sequence: Synthetic Antisense oligonucleotide
  modified_base 1: mod_base = OTHER; note = 5-methyl
  modified_base 5..6: mod_base = OTHER; note = 5-methyl
  modified_base 10..12: mod_base = OTHER; note = 5-methyl
  modified_base 6: mod_base = OTHER; note = bicyclic nucleic acid (BNA)
  modified_base 12: mod_base = OTHER; note = bicyclic nucleic acid (BNA)
  source 1..18: mol_type = other DNA
ctgtccaagcccggttga

SEQ ID NO: 11406 - DNA, 18 bp, synthetic construct
  misc_feature 1..18: note = Description of Artificial Sequence: Synthetic Antisense oligonucleotide
  modified_base 1: mod_base = OTHER; note = 5-methyl
  modified_base 5..6: mod_base = OTHER; note = 5-methyl
  modified_base 10..12: mod_base = OTHER; note = 5-methyl
  modified_base 5..6: mod_base = OTHER; note = bicyclic nucleic acid (BNA)
  source 1..18: mol_type = other DNA
ctgtccaagcccggttga

SEQ ID NO: 11407 - DNA, 18 bp, synthetic construct
  misc_feature 1..18: note = Description of Artificial Sequence: Synthetic Antisense oligonucleotide
  modified_base 1: mod_base = OTHER; note = 5-methyl
  modified_base 5..6: mod_base = OTHER; note = 5-methyl
  modified_base 10..12: mod_base = OTHER; note = 5-methyl
  modified_base 11: mod_base = OTHER; note = bicyclic nucleic acid (BNA)
  modified_base 14: mod_base = OTHER; note = bicyclic nucleic acid (BNA)
  source 1..18: mol_type = other DNA
ctgtccaagcccggttga

SEQ ID NO: 11408 - DNA, 18 bp, synthetic construct
  misc_feature 1..18: note = Description of Artificial Sequence: Synthetic Antisense oligonucleotide
  modified_base 1: mod_base = OTHER; note = 5-methyl
  modified_base 5..6: mod_base = OTHER; note = 5-methyl
  modified_base 10..12: mod_base = OTHER; note = 5-methyl
  modified_base 9: mod_base = OTHER; note = bicyclic nucleic acid (BNA)
  modified_base 12: mod_base = OTHER; note = bicyclic nucleic acid (BNA)
  source 1..18: mol_type = other DNA
ctgtccaagcccggttga

SEQ ID NO: 11409 - DNA, 18 bp, synthetic construct
  misc_feature 1..18: note = Description of Artificial Sequence: Synthetic Antisense oligonucleotide
  modified_base 1: mod_base = OTHER; note = 5-methyl
  modified_base 5..6: mod_base = OTHER; note = 5-methyl
  modified_base 10..12: mod_base = OTHER; note = 5-methyl
  modified_base 5: mod_base = OTHER; note = bicyclic nucleic acid (BNA)
  modified_base 17: mod_base = OTHER; note = bicyclic nucleic acid (BNA)
  source 1..18: mol_type = other DNA
ctgtccaagcccggttga

SEQ ID NO: 11410 - DNA, 18 bp, synthetic construct
  misc_feature 1..18: note = Description of Artificial Sequence: Synthetic Antisense oligonucleotide
  modified_base 1: mod_base = OTHER; note = 5-methyl
  modified_base 5..6: mod_base = OTHER; note = 5-methyl
  modified_base 10..12: mod_base = OTHER; note = 5-methyl
  modified_base 3: mod_base = OTHER; note = bicyclic nucleic acid (BNA)
  modified_base 11: mod_base = OTHER; note = bicyclic nucleic acid (BNA)
  source 1..18: mol_type = other DNA
ctgtccaagcccggttga

SEQ ID NO: 11411 - DNA, 18 bp, synthetic construct
  misc_feature 1..18: note = Description of Artificial Sequence: Synthetic Antisense oligonucleotide
  modified_base 1: mod_base = OTHER; note = 5-methyl
  modified_base 5..6: mod_base = OTHER; note = 5-methyl
  modified_base 10..12: mod_base = OTHER; note = 5-methyl
  modified_base 10..11: mod_base = OTHER; note = bicyclic nucleic acid (BNA)
  source 1..18: mol_type = other DNA
ctgtccaagcccggttga

SEQ ID NO: 11412 - DNA, 18 bp, synthetic construct
  misc_feature 1..18: note = Description of Artificial Sequence: Synthetic Antisense oligonucleotide
  modified_base 1: mod_base = OTHER; note = 5-methyl
  modified_base 5..6: mod_base = OTHER; note = 5-methyl
  modified_base 10..12: mod_base = OTHER; note = 5-methyl
  modified_base 10: mod_base = OTHER; note = bicyclic nucleic acid (BNA)
  modified_base 17: mod_base = OTHER; note = bicyclic nucleic acid (BNA)
  source 1..18: mol_type = other DNA
ctgtccaagcccggttga

SEQ ID NO: 11413 - DNA, 18 bp, synthetic construct
  misc_feature 1..18: note = Description of Artificial Sequence: Synthetic Antisense oligonucleotide
  modified_base 1: mod_base = OTHER; note = 5-methyl
  modified_base 5..6: mod_base = OTHER; note = 5-methyl
  modified_base 10..12: mod_base = OTHER; note = 5-methyl
  modified_base 12..13: mod_base = OTHER; note = bicyclic nucleic acid (BNA)
  source 1..18: mol_type = other DNA
ctgtccaagcccggttga

SEQ ID NO: 11414 - DNA, 18 bp, synthetic construct
  misc_feature 1..18: note = Description of Artificial Sequence: Synthetic Antisense oligonucleotide
  modified_base 1: mod_base = OTHER; note = 5-methyl
  modified_base 5..6: mod_base = OTHER; note = 5-methyl
  modified_base 10..12: mod_base = OTHER; note = 5-methyl
  modified_base 5: mod_base = OTHER; note = bicyclic nucleic acid (BNA)
  modified_base 12: mod_base = OTHER; note = bicyclic nucleic acid (BNA)
  source 1..18: mol_type = other DNA
ctgtccaagcccggttga

SEQ ID NO: 11415 - DNA, 18 bp, synthetic construct
  misc_feature 1..18: note = Description of Artificial Sequence: Synthetic Antisense oligonucleotide
  modified_base 1: mod_base = OTHER; note = 5-methyl
  modified_base 5..6: mod_base = OTHER; note = 5-methyl
  modified_base 10..12: mod_base = OTHER; note = 5-methyl
  modified_base 10: mod_base = OTHER; note = bicyclic nucleic acid (BNA)
  modified_base 14: mod_base = OTHER; note = bicyclic nucleic acid (BNA)
  source 1..18: mol_type = other DNA
ctgtccaagcccggttga

SEQ ID NO: 11416 - DNA, 18 bp, synthetic construct
  misc_feature 1..18: note = Description of Artificial Sequence: Synthetic Antisense oligonucleotide
  modified_base 1: mod_base = OTHER; note = 5-methyl
  modified_base 5..6: mod_base = OTHER; note = 5-methyl
  modified_base 10..12: mod_base = OTHER; note = 5-methyl
  modified_base 6: mod_base = OTHER; note = bicyclic nucleic acid (BNA)
  modified_base 11: mod_base = OTHER; note = bicyclic nucleic acid (BNA)
  source 1..18: mol_type = other DNA
ctgtccaagcccggttga

SEQ ID NO: 11417 - DNA, 18 bp, synthetic construct
  misc_feature 1..18: note = Description of Artificial Sequence: Synthetic Antisense oligonucleotide
  modified_base 1: mod_base = OTHER; note = 5-methyl
  modified_base 5..6: mod_base = OTHER; note = 5-methyl
  modified_base 10..12: mod_base = OTHER; note = 5-methyl
  modified_base 6: mod_base = OTHER; note = bicyclic nucleic acid (BNA)
  modified_base 17: mod_base = OTHER; note = bicyclic nucleic acid (BNA)
  source 1..18: mol_type = other DNA
ctgtccaagcccggttga

SEQ ID NO: 11418 - DNA, 18 bp, synthetic construct
  misc_feature 1..18: note = Description of Artificial Sequence: Synthetic Antisense oligonucleotide
  modified_base 1: mod_base = OTHER; note = 5-methyl
  modified_base 5..6: mod_base = OTHER; note = 5-methyl
  modified_base 10..12: mod_base = OTHER; note = 5-methyl
  modified_base 9: mod_base = OTHER; note = bicyclic nucleic acid (BNA)
  modified_base 13: mod_base = OTHER; note = bicyclic nucleic acid (BNA)
  source 1..18: mol_type = other DNA
ctgtccaagcccggttga

SEQ ID NO: 11419 - DNA, 18 bp, synthetic construct
  misc_feature 1..18: note = Description of Artificial Sequence: Synthetic Antisense oligonucleotide
  modified_base 1: mod_base = OTHER; note = 5-methyl
  modified_base 5..6: mod_base = OTHER; note = 5-methyl
  modified_base 10..12: mod_base = OTHER; note = 5-methyl
  modified_base 11: mod_base = OTHER; note = bicyclic nucleic acid (BNA)
  modified_base 17: mod_base = OTHER; note = bicyclic nucleic acid (BNA)
  source 1..18: mol_type = other DNA
ctgtccaagcccggttga

SEQ ID NO: 11420 - DNA, 18 bp, synthetic construct
  misc_feature 1..18: note = Description of Artificial Sequence: Synthetic Antisense oligonucleotide
  modified_base 1: mod_base = OTHER; note = 5-methyl
  modified_base 5..6: mod_base = OTHER; note = 5-methyl
  modified_base 10..12: mod_base = OTHER; note = 5-methyl
  modified_base 3: mod_base = OTHER; note = bicyclic nucleic acid (BNA)
  modified_base 12: mod_base = OTHER; note = bicyclic nucleic acid (BNA)
  source 1..18: mol_type = other DNA
ctgtccaagcccggttga

SEQ ID NO: 11421 - DNA, 18 bp, synthetic construct
  misc_feature 1..18: note = Description of Artificial Sequence: Synthetic Antisense oligonucleotide
  modified_base 1: mod_base = OTHER; note = 5-methyl
  modified_base 5..6: mod_base = OTHER; note = 5-methyl
  modified_base 10..12: mod_base = OTHER; note = 5-methyl
  modified_base 3: mod_base = OTHER; note = bicyclic nucleic acid (BNA)
  modified_base 5: mod_base = OTHER; note = bicyclic nucleic acid (BNA)
  source 1..18: mol_type = other DNA
ctgtccaagcccggttga

SEQ ID NO: 11422 - DNA, 18 bp, synthetic construct
  misc_feature 1..18: note = Description of Artificial Sequence: Synthetic Antisense oligonucleotide
  modified_base 1: mod_base = OTHER; note = 5-methyl
  modified_base 5..6: mod_base = OTHER; note = 5-methyl
  modified_base 10..12: mod_base = OTHER; note = 5-methyl
  modified_base 10: mod_base = OTHER; note = bicyclic nucleic acid (BNA)
  modified_base 13: mod_base = OTHER; note = bicyclic nucleic acid (BNA)
  source 1..18: mol_type = other DNA
ctgtccaagcccggttga

SEQ ID NO: 11423 - DNA, 20 bp, synthetic construct
  misc_feature 1..20: note = Description of Artificial Sequence: Synthetic Antisense oligonucleotide
  modified_base 2: mod_base = OTHER; note = 5-methyl
  modified_base 14: mod_base = OTHER; note = 5-methyl
  modified_base 19: mod_base = OTHER; note = 5-methyl
  modified_base 2: mod_base = OTHER; note = bicyclic nucleic acid (BNA)
  source 1..20: mol_type = other DNA
tcaaggaagatggcatttct

SEQ ID NO: 11424 - DNA, 20 bp, synthetic construct
  misc_feature 1..20: note = Description of Artificial Sequence: Synthetic Antisense oligonucleotide
  modified_base 2: mod_base = OTHER; note = 5-methyl
  modified_base 14: mod_base = OTHER; note = 5-methyl
  modified_base 19: mod_base = OTHER; note = 5-methyl
  modified_base 9: mod_base = OTHER; note = bicyclic nucleic acid (BNA)
  source 1..20: mol_type = other DNA
tcaaggaagatggcatttct

SEQ ID NO: 11425 - DNA, 20 bp, synthetic construct
  misc_feature 1..20: note = Description of Artificial Sequence: Synthetic Antisense oligonucleotide
  modified_base 2: mod_base = OTHER; note = 5-methyl
  modified_base 14: mod_base = OTHER; note = 5-methyl
  modified_base 19: mod_base = OTHER; note = 5-methyl
  modified_base 5: mod_base = OTHER; note = bicyclic nucleic acid (BNA)
  source 1..20: mol_type = other DNA
tcaaggaagatggcatttct

SEQ ID NO: 11426 - DNA, 20 bp, synthetic construct
  misc_feature 1..20: note = Description of Artificial Sequence: Synthetic Antisense oligonucleotide
  modified_base 2: mod_base = OTHER; note = 5-methyl
  modified_base 14: mod_base = OTHER; note = 5-methyl
  modified_base 19: mod_base = OTHER; note = 5-methyl
  modified_base 6: mod_base = OTHER; note = bicyclic nucleic acid (BNA)
  source 1..20: mol_type = other DNA
tcaaggaagatggcatttct

SEQ ID NO: 11427 - DNA, 20 bp, synthetic construct
  misc_feature 1..20: note = Description of Artificial Sequence: Synthetic Antisense oligonucleotide
  modified_base 2: mod_base = OTHER; note = 5-methyl
  modified_base 14: mod_base = OTHER; note = 5-methyl
  modified_base 19: mod_base = OTHER; note = 5-methyl
  modified_base 12: mod_base = OTHER; note = bicyclic nucleic acid (BNA)
  source 1..20: mol_type = other DNA
tcaaggaagatggcatttct

SEQ ID NO: 11428 - DNA, 20 bp, synthetic construct
  misc_feature 1..20: note = Description of Artificial Sequence: Synthetic Antisense oligonucleotide
  modified_base 2: mod_base = OTHER; note = 5-methyl
  modified_base 14: mod_base = OTHER; note = 5-methyl
  modified_base 19: mod_base = OTHER; note = 5-methyl
  modified_base 13: mod_base = OTHER; note = bicyclic nucleic acid (BNA)
  source 1..20: mol_type = other DNA
tcaaggaagatggcatttct

SEQ ID NO: 11429 - DNA, 20 bp, synthetic construct
  misc_feature 1..20: note = Description of Artificial Sequence: Synthetic Antisense oligonucleotide
  modified_base 2: mod_base = OTHER; note = 5-methyl
  modified_base 14: mod_base = OTHER; note = 5-methyl
  modified_base 19: mod_base = OTHER; note = 5-methyl
  modified_base 19: mod_base = OTHER; note = bicyclic nucleic acid (BNA)
  source 1..20: mol_type = other DNA
tcaaggaagatggcatttct

SEQ ID NO: 11430 - DNA, 20 bp, synthetic construct
  misc_feature 1..20: note = Description of Artificial Sequence: Synthetic Antisense oligonucleotide
  modified_base 2: mod_base = OTHER; note = 5-methyl
  modified_base 14: mod_base = OTHER; note = 5-methyl
  modified_base 19: mod_base = OTHER; note = 5-methyl
  modified_base 14: mod_base = OTHER; note = bicyclic nucleic acid (BNA)
  source 1..20: mol_type = other DNA
tcaaggaagatggcatttct

SEQ ID NO: 11431 - DNA, 22 bp, synthetic construct
  misc_feature 1..22: note = Description of Artificial Sequence: Synthetic Antisense oligonucleotide
  modified_base 2: mod_base = OTHER; note = 5-methyl
  modified_base 14: mod_base = OTHER; note = 5-methyl
  modified_base 19: mod_base = OTHER; note = 5-methyl
  modified_base 2: mod_base = OTHER; note = bicyclic nucleic acid (BNA)
  source 1..22: mol_type = other DNA
tcaaggaagatggcatttctag

SEQ ID NO: 11432 - DNA, 22 bp, synthetic construct
  misc_feature 1..22: note = Description of Artificial Sequence: Synthetic Antisense oligonucleotide
  modified_base 2: mod_base = OTHER; note = 5-methyl
  modified_base 14: mod_base = OTHER; note = 5-methyl
  modified_base 19: mod_base = OTHER; note = 5-methyl
  modified_base 9: mod_base = OTHER; note = bicyclic nucleic acid (BNA)
  source 1..22: mol_type = other DNA
tcaaggaagatggcatttctag

SEQ ID NO: 11433 - DNA, 22 bp, synthetic construct
  misc_feature 1..22: note = Description of Artificial Sequence: Synthetic Antisense oligonucleotide
  modified_base 2: mod_base = OTHER; note = 5-methyl
  modified_base 14: mod_base = OTHER; note = 5-methyl
  modified_base 19: mod_base = OTHER; note = 5-methyl
  modified_base 5: mod_base = OTHER; note = bicyclic nucleic acid (BNA)
  source 1..22: mol_type = other DNA
tcaaggaagatggcatttctag

SEQ ID NO: 11434 - DNA, 22 bp, synthetic construct
  misc_feature 1..22: note = Description of Artificial Sequence: Synthetic Antisense oligonucleotide
  modified_base 2: mod_base = OTHER; note = 5-methyl
  modified_base 14: mod_base = OTHER; note = 5-methyl
  modified_base 19: mod_base = OTHER; note = 5-methyl
  modified_base 6: mod_base = OTHER; note = bicyclic nucleic acid (BNA)
  source 1..22: mol_type = other DNA
tcaaggaagatggcatttctag

SEQ ID NO: 11435 - DNA, 22 bp, synthetic construct
  misc_feature 1..22: note = Description of Artificial Sequence: Synthetic Antisense oligonucleotide
  modified_base 2: mod_base = OTHER; note = 5-methyl
  modified_base 14: mod_base = OTHER; note = 5-methyl
  modified_base 19: mod_base = OTHER; note = 5-methyl
  modified_base 12: mod_base = OTHER; note = bicyclic nucleic acid (BNA)
  source 1..22: mol_type = other DNA
tcaaggaagatggcatttctag

SEQ ID NO: 11436 - DNA, 22 bp, synthetic construct
  misc_feature 1..22: note = Description of Artificial Sequence: Synthetic Antisense oligonucleotide
  modified_base 2: mod_base = OTHER; note = 5-methyl
  modified_base 14: mod_base = OTHER; note = 5-methyl
  modified_base 19: mod_base = OTHER; note = 5-methyl
  modified_base 13: mod_base = OTHER; note = bicyclic nucleic acid (BNA)
  source 1..22: mol_type = other DNA
tcaaggaagatggcatttctag

SEQ ID NO: 11437 - DNA, 22 bp, synthetic construct
  misc_feature 1..22: note = Description of Artificial Sequence: Synthetic Antisense oligonucleotide
  modified_base 2: mod_base = OTHER; note = 5-methyl
  modified_base 14: mod_base = OTHER; note = 5-methyl
  modified_base 19: mod_base = OTHER; note = 5-methyl
  modified_base 19: mod_base = OTHER; note = bicyclic nucleic acid (BNA)
  source 1..22: mol_type = other DNA
tcaaggaagatggcatttctag

SEQ ID NO: 11438 - DNA, 22 bp, synthetic construct
  misc_feature 1..22: note = Description of Artificial Sequence: Synthetic Antisense oligonucleotide
  modified_base 2: mod_base = OTHER; note = 5-methyl
  modified_base 14: mod_base = OTHER; note = 5-methyl
  modified_base 19: mod_base = OTHER; note = 5-methyl
  modified_base 14: mod_base = OTHER; note = bicyclic nucleic acid (BNA)
  source 1..22: mol_type = other DNA
tcaaggaagatggcatttctag

SEQ ID NO: 11439 - DNA, 20 bp, synthetic construct
  misc_feature 1..20: note = Description of Artificial Sequence: Synthetic Antisense oligonucleotide
  modified_base 2: mod_base = OTHER; note = 5-methyl
  modified_base 14: mod_base = OTHER; note = 5-methyl
  modified_base 19: mod_base = OTHER; note = 5-methyl
  modified_base 9: mod_base = OTHER; note = bicyclic nucleic acid (BNA)
  modified_base 14: mod_base = OTHER; note = bicyclic nucleic acid (BNA)
  source 1..20: mol_type = other DNA
tcaaggaagatggcatttct

SEQ ID NO: 11440 - DNA, 20 bp, synthetic construct
  misc_feature 1..20: note = Description of Artificial Sequence: Synthetic Antisense oligonucleotide
  modified_base 2: mod_base = OTHER; note = 5-methyl
  modified_base 14: mod_base = OTHER; note = 5-methyl
  modified_base 19: mod_base = OTHER; note = 5-methyl
  modified_base 5: mod_base = OTHER; note = bicyclic nucleic acid (BNA)
  modified_base 9: mod_base = OTHER; note = bicyclic nucleic acid (BNA)
  source 1..20: mol_type = other DNA
tcaaggaagatggcatttct

SEQ ID NO: 11441 - DNA, 20 bp, synthetic construct
  misc_feature 1..20: note = Description of Artificial Sequence: Synthetic Antisense oligonucleotide
  modified_base 2: mod_base = OTHER; note = 5-methyl
  modified_base 14: mod_base = OTHER; note = 5-methyl
  modified_base 19: mod_base = OTHER; note = 5-methyl
  modified_base 5: mod_base = OTHER; note = bicyclic nucleic acid (BNA)
  modified_base 19: mod_base = OTHER; note = bicyclic nucleic acid (BNA)
  source 1..20: mol_type = other DNA
tcaaggaagatggcatttct

SEQ ID NO: 11442 - DNA, 20 bp, synthetic construct
  misc_feature 1..20: note = Description of Artificial Sequence: Synthetic Antisense oligonucleotide
  modified_base 2: mod_base = OTHER; note = 5-methyl
  modified_base 14: mod_base = OTHER; note = 5-methyl
  modified_base 19: mod_base = OTHER; note = 5-methyl
  modified_base 6: mod_base = OTHER; note = bicyclic nucleic acid (BNA)
  modified_base 14: mod_base = OTHER; note = bicyclic nucleic acid (BNA)
  source 1..20: mol_type = other DNA
tcaaggaagatggcatttct

SEQ ID NO: 11443 - DNA, 20 bp, synthetic construct
  misc_feature 1..20: note = Description of Artificial Sequence: Synthetic Antisense oligonucleotide
  modified_base 2: mod_base = OTHER; note = 5-methyl
  modified_base 14: mod_base = OTHER; note = 5-methyl
  modified_base 19: mod_base = OTHER; note = 5-methyl
  modified_base 5: mod_base = OTHER; note = bicyclic nucleic acid (BNA)
  modified_base 13: mod_base = OTHER; note = bicyclic nucleic acid (BNA)
  source 1..20: mol_type = other DNA
tcaaggaagatggcatttct

SEQ ID NO: 11444 - DNA, 20 bp, synthetic construct
  misc_feature 1..20: note = Description of Artificial Sequence: Synthetic Antisense oligonucleotide
  modified_base 2: mod_base = OTHER; note = 5-methyl
  modified_base 14: mod_base = OTHER; note = 5-methyl
  modified_base 19: mod_base = OTHER; note = 5-methyl
  modified_base 2: mod_base = OTHER; note = bicyclic nucleic acid (BNA)
  modified_base 12: mod_base = OTHER; note = bicyclic nucleic acid (BNA)
  source 1..20: mol_type = other DNA
tcaaggaagatggcatttct

SEQ ID NO: 11445 - DNA, 20 bp, synthetic construct
  misc_feature 1..20: note = Description of Artificial Sequence: Synthetic Antisense oligonucleotide
  modified_base 2: mod_base = OTHER; note = 5-methyl
  modified_base 14: mod_base = OTHER; note = 5-methyl
  modified_base 19: mod_base = OTHER; note = 5-methyl
  modified_base 6: mod_base = OTHER; note = bicyclic nucleic acid (BNA)
  modified_base 9: mod_base = OTHER; note = bicyclic nucleic acid (BNA)
  source 1..20: mol_type = other DNA
tcaaggaagatggcatttct

SEQ ID NO: 11446 - DNA, 20 bp, synthetic construct
  misc_feature 1..20: note = Description of Artificial Sequence: Synthetic Antisense oligonucleotide
  modified_base 2: mod_base = OTHER; note = 5-methyl
  modified_base 14: mod_base = OTHER; note = 5-methyl
  modified_base 19: mod_base = OTHER; note = 5-methyl
  modified_base 13..14: mod_base = OTHER; note = bicyclic nucleic acid (BNA)
  source 1..20: mol_type = other DNA
tcaaggaagatggcatttct

SEQ ID NO: 11447 - DNA, 20 bp, synthetic construct
  misc_feature 1..20: note = Description of Artificial Sequence: Synthetic Antisense oligonucleotide
  modified_base 2: mod_base = OTHER; note = 5-methyl
  modified_base 14: mod_base = OTHER; note = 5-methyl
  modified_base 19: mod_base = OTHER; note = 5-methyl
  modified_base 6: mod_base = OTHER; note = bicyclic nucleic acid (BNA)
  modified_base 13: mod_base = OTHER; note = bicyclic nucleic acid (BNA)
  source 1..20: mol_type = other DNA
tcaaggaagatggcatttct

SEQ ID NO: 11448 - DNA, 20 bp, synthetic construct
  misc_feature 1..20: note = Description of Artificial Sequence: Synthetic Antisense oligonucleotide
  modified_base 2: mod_base = OTHER; note = 5-methyl
  modified_base 14: mod_base = OTHER; note = 5-methyl
  modified_base 19: mod_base = OTHER; note = 5-methyl
  modified_base 6: mod_base = OTHER; note = bicyclic nucleic acid (BNA)
  modified_base 19: mod_base = OTHER; note = bicyclic nucleic acid (BNA)
  source 1..20: mol_type = other DNA
tcaaggaagatggcatttct

SEQ ID NO: 11449 - DNA, 20 bp, synthetic construct
  misc_feature 1..20: note = Description of Artificial Sequence: Synthetic Antisense oligonucleotide
  modified_base 2: mod_base = OTHER; note = 5-methyl
  modified_base 14: mod_base = OTHER; note = 5-methyl
  modified_base 19: mod_base = OTHER; note = 5-methyl
  modified_base 5: mod_base = OTHER; note = bicyclic nucleic acid (BNA)
  modified_base 14: mod_base = OTHER; note = bicyclic nucleic acid (BNA)
  source 1..20: mol_type = other DNA
tcaaggaagatggcatttct

SEQ ID NO: 11450 - DNA, 20 bp, synthetic construct
  misc_feature 1..20: note = Description of Artificial Sequence: Synthetic Antisense oligonucleotide
  modified_base 2: mod_base = OTHER; note = 5-methyl
  modified_base 14: mod_base = OTHER; note = 5-methyl
  modified_base 19: mod_base = OTHER; note = 5-methyl
  modified_base 2: mod_base = OTHER; note = bicyclic nucleic acid (BNA)
  modified_base 6: mod_base = OTHER; note = bicyclic nucleic acid (BNA)
  source 1..20: mol_type = other DNA
tcaaggaagatggcatttct

SEQ ID NO: 11451 - DNA, 20 bp, synthetic construct
  misc_feature 1..20: note = Description of Artificial Sequence: Synthetic Antisense oligonucleotide
  modified_base 2: mod_base = OTHER; note = 5-methyl
  modified_base 14: mod_base = OTHER; note = 5-methyl
  modified_base 19: mod_base = OTHER; note = 5-methyl
  modified_base 12: mod_base = OTHER; note = bicyclic nucleic acid (BNA)
  modified_base 19: mod_base = OTHER; note = bicyclic nucleic acid (BNA)
  source 1..20: mol_type = other DNA
tcaaggaagatggcatttct

SEQ ID NO: 11452 - DNA, 20 bp, synthetic construct
  misc_feature 1..20: note = Description of Artificial Sequence: Synthetic Antisense oligonucleotide
  modified_base 2: mod_base = OTHER; note = 5-methyl
  modified_base 14: mod_base = OTHER; note = 5-methyl
  modified_base 19: mod_base = OTHER; note = 5-methyl
  modified_base 12: mod_base = OTHER; note = bicyclic nucleic acid (BNA)
  modified_base 14: mod_base = OTHER; note = bicyclic nucleic acid (BNA)
  source 1..20: mol_type = other DNA
tcaaggaagatggcatttct

SEQ ID NO: 11453 - DNA, 20 bp, synthetic construct
  misc_feature 1..20: note = Description of Artificial Sequence: Synthetic Antisense oligonucleotide
  modified_base 2: mod_base = OTHER; note = 5-methyl
  modified_base 14: mod_base = OTHER; note = 5-methyl
  modified_base 19: mod_base = OTHER; note = 5-methyl
  modified_base 6: mod_base = OTHER; note = bicyclic nucleic acid (BNA)
  modified_base 12: mod_base = OTHER; note = bicyclic nucleic acid (BNA)
  source 1..20: mol_type = other DNA
tcaaggaagatggcatttct

SEQ ID NO: 11454 - DNA, 20 bp, synthetic construct
  misc_feature 1..20: note = Description of Artificial Sequence: Synthetic Antisense oligonucleotide
  modified_base 2: mod_base = OTHER; note = 5-methyl
  modified_base 14: mod_base = OTHER; note = 5-methyl
  modified_base 19: mod_base = OTHER; note = 5-methyl
  modified_base 5..6: mod_base = OTHER; note = bicyclic nucleic acid (BNA)
  source 1..20: mol_type = other DNA
tcaaggaagatggcatttct

SEQ ID NO: 11455 - DNA, 20 bp, synthetic construct
  misc_feature 1..20: note = Description of Artificial Sequence: Synthetic Antisense oligonucleotide
  modified_base 2: mod_base = OTHER; note = 5-methyl
  modified_base 14: mod_base = OTHER; note = 5-methyl
  modified_base 19: mod_base = OTHER; note = 5-methyl
  modified_base 2: mod_base = OTHER; note = bicyclic nucleic acid (BNA)
  modified_base 14: mod_base = OTHER; note = bicyclic nucleic acid (BNA)
  source 1..20: mol_type = other DNA
tcaaggaagatggcatttct

SEQ ID NO: 11456 - DNA, 20 bp, synthetic construct
  misc_feature 1..20: note = Description of Artificial Sequence: Synthetic Antisense oligonucleotide
  modified_base 2: mod_base = OTHER; note = 5-methyl
  modified_base 14: mod_base = OTHER; note = 5-methyl
  modified_base 19: mod_base = OTHER; note = 5-methyl
  modified_base 9: mod_base = OTHER; note = bicyclic nucleic acid (BNA)
  modified_base 12: mod_base = OTHER; note = bicyclic nucleic acid (BNA)
  source 1..20: mol_type = other DNA
tcaaggaagatggcatttct

SEQ ID NO: 11457 - DNA, 20 bp, synthetic construct
  misc_feature 1..20: note = Description of Artificial Sequence: Synthetic Antisense oligonucleotide
  modified_base 2: mod_base = OTHER; note = 5-methyl
  modified_base 14: mod_base = OTHER; note = 5-methyl
  modified_base 19: mod_base = OTHER; note = 5-methyl
  modified_base 2: mod_base = OTHER; note = bicyclic nucleic acid (BNA)
  modified_base 5: mod_base = OTHER; note = bicyclic nucleic acid (BNA)
  source 1..20: mol_type = other DNA
tcaaggaagatggcatttct

SEQ ID NO: 11458 - DNA, 20 bp, synthetic construct
  misc_feature 1..20: note = Description of Artificial Sequence: Synthetic Antisense oligonucleotide
  modified_base 2: mod_base = OTHER; note = 5-methyl
  modified_base 14: mod_base = OTHER; note = 5-methyl
  modified_base 19: mod_base = OTHER; note = 5-methyl
  modified_base 13: mod_base = OTHER; note = bicyclic nucleic acid (BNA)
  modified_base 19: mod_base = OTHER; note = bicyclic nucleic acid (BNA)
  source 1..20: mol_type = other DNA
tcaaggaagatggcatttct

SEQ ID NO: 11459 - DNA, 20 bp, synthetic construct
  misc_feature 1..20: note = Description of Artificial Sequence: Synthetic Antisense oligonucleotide
  modified_base 2: mod_base = OTHER; note = 5-methyl
  modified_base 14: mod_base = OTHER; note = 5-methyl
  modified_base 19: mod_base = OTHER; note = 5-methyl
  modified_base 12..13: mod_base = OTHER; note = bicyclic nucleic acid (BNA)
  source 1..20: mol_type = other DNA
tcaaggaagatggcatttct

SEQ ID NO: 11460 - DNA, 20 bp, synthetic construct
  misc_feature 1..20: note = Description of Artificial Sequence: Synthetic Antisense oligonucleotide
  modified_base 2: mod_base = OTHER; note = 5-methyl
  modified_base 14: mod_base = OTHER; note = 5-methyl
  modified_base 19: mod_base = OTHER; note = 5-methyl
  modified_base 5: mod_base = OTHER; note = bicyclic nucleic acid (BNA)
  modified_base 12: mod_base = OTHER; note = bicyclic nucleic acid (BNA)
  source 1..20: mol_type = other DNA
tcaaggaagatggcatttct

SEQ ID NO: 11461 - DNA, 20 bp, synthetic construct
  misc_feature 1..20: note = Description of Artificial Sequence: Synthetic Antisense oligonucleotide
  modified_base 2: mod_base = OTHER; note = 5-methyl
  modified_base 14: mod_base = OTHER; note = 5-methyl
  modified_base 19: mod_base = OTHER; note = 5-methyl
  modified_base 2: mod_base = OTHER; note = bicyclic nucleic acid (BNA)
  modified_base 13: mod_base = OTHER; note = bicyclic nucleic acid (BNA)
  source 1..20: mol_type = other DNA
tcaaggaagatggcatttct

SEQ ID NO: 11462 - DNA, 20 bp, synthetic construct
  misc_feature 1..20: note = Description of Artificial Sequence: Synthetic Antisense oligonucleotide
  modified_base 2: mod_base = OTHER; note = 5-methyl
  modified_base 14: mod_base = OTHER; note = 5-methyl
  modified_base 19: mod_base = OTHER; note = 5-methyl
  modified_base 9: mod_base = OTHER; note = bicyclic nucleic acid (BNA)
  modified_base 13: mod_base = OTHER; note = bicyclic nucleic acid (BNA)
  source 1..20: mol_type = other DNA
tcaaggaagatggcatttct

SEQ ID NO: 11463 - DNA, 20 bp, synthetic construct
  misc_feature 1..20: note = Description of Artificial Sequence: Synthetic Antisense oligonucleotide
  modified_base 2: mod_base = OTHER; note = 5-methyl
  modified_base 14: mod_base = OTHER; note = 5-methyl
  modified_base 19: mod_base = OTHER; note = 5-methyl
  modified_base 2: mod_base = OTHER; note = bicyclic nucleic acid (BNA)
  modified_base 19: mod_base = OTHER; note = bicyclic nucleic acid (BNA)
  source 1..20: mol_type = other DNA
tcaaggaagatggcatttct

SEQ ID NO: 11464 - DNA, 20 bp, synthetic construct
  misc_feature 1..20: note = Description of Artificial Sequence: Synthetic Antisense oligonucleotide
  modified_base 2: mod_base = OTHER; note = 5-methyl
  modified_base 14: mod_base = OTHER; note = 5-methyl
  modified_base 19: mod_base = OTHER; note = 5-methyl
  modified_base 2: mod_base = OTHER; note = bicyclic nucleic acid (BNA)
  modified_base 9: mod_base = OTHER; note = bicyclic nucleic acid (BNA)
  source 1..20: mol_type = other DNA
tcaaggaagatggcatttct

SEQ ID NO: 11465 - DNA, 20 bp, synthetic construct
  misc_feature 1..20: note = Description of Artificial Sequence: Synthetic Antisense oligonucleotide
  modified_base 2: mod_base = OTHER; note = 5-methyl
  modified_base 14: mod_base = OTHER; note = 5-methyl
  modified_base 19: mod_base = OTHER; note = 5-methyl
  modified_base 14: mod_base = OTHER; note = bicyclic nucleic acid (BNA)
  modified_base 19: mod_base = OTHER; note = bicyclic nucleic acid (BNA)
  source 1..20: mol_type = other DNA
tcaaggaagatggcatttct

SEQ ID NO: 11466 - DNA, 20 bp, synthetic construct
  misc_feature 1..20: note = Description of Artificial Sequence: Synthetic Antisense oligonucleotide
  modified_base 2: mod_base = OTHER; note = 5-methyl
  modified_base 14: mod_base = OTHER; note = 5-methyl
  modified_base 19: mod_base = OTHER; note = 5-methyl
  modified_base 9: mod_base = OTHER; note = bicyclic nucleic acid (BNA)
  modified_base 19: mod_base = OTHER; note = bicyclic nucleic acid (BNA)
  source 1..20: mol_type = other DNA
tcaaggaagatggcatttct

SEQ ID NO: 11467 - DNA, 22 bp, synthetic construct
  misc_feature 1..22: note = Description of Artificial Sequence: Synthetic Antisense oligonucleotide
  modified_base 2: mod_base = OTHER; note = 5-methyl
  modified_base 14: mod_base = OTHER; note = 5-methyl
  modified_base 19: mod_base = OTHER; note = 5-methyl
  modified_base 9: mod_base = OTHER; note = bicyclic nucleic acid (BNA)
  modified_base 14: mod_base = OTHER; note = bicyclic nucleic acid (BNA)
  source 1..22: mol_type = other DNA
tcaaggaagatggcatttctag

SEQ ID NO: 11468 - DNA, 22 bp, synthetic construct
  misc_feature 1..22: note = Description of Artificial Sequence: Synthetic Antisense oligonucleotide
  modified_base 2: mod_base = OTHER; note = 5-methyl
  modified_base 14: mod_base = OTHER; note = 5-methyl
  modified_base 19: mod_base = OTHER; note = 5-methyl
  modified_base 5: mod_base = OTHER; note = bicyclic nucleic acid (BNA)
  modified_base 9: mod_base = OTHER; note = bicyclic nucleic acid (BNA)
  source 1..22: mol_type = other DNA
tcaaggaagatggcatttctag

SEQ ID NO: 11469 - DNA, 22 bp, synthetic construct
  misc_feature 1..22: note = Description of Artificial Sequence: Synthetic Antisense oligonucleotide
  modified_base 2: mod_base = OTHER; note = 5-methyl
  modified_base 14: mod_base = OTHER; note = 5-methyl
  modified_base 19: mod_base = OTHER; note = 5-methyl
  modified_base 5: mod_base = OTHER; note = bicyclic nucleic acid (BNA)
  modified_base 19: mod_base = OTHER; note = bicyclic nucleic acid (BNA)
  source 1..22: mol_type = other DNA
tcaaggaagatggcatttctag

SEQ ID NO: 11470 - DNA, 22 bp, synthetic construct
  misc_feature 1..22: note = Description of Artificial Sequence: Synthetic Antisense oligonucleotide
  modified_base 2: mod_base = OTHER; note = 5-methyl
  modified_base 14: mod_base = OTHER; note = 5-methyl
  modified_base 19: mod_base = OTHER; note = 5-methyl
  modified_base 6: mod_base = OTHER; note = bicyclic nucleic acid (BNA)
  modified_base 14: mod_base = OTHER; note = bicyclic nucleic acid (BNA)
  source 1..22: mol_type = other DNA
tcaaggaagatggcatttctag

SEQ ID NO: 11471 - DNA, 22 bp, synthetic construct
  misc_feature 1..22: note = Description of Artificial Sequence: Synthetic Antisense oligonucleotide
  modified_base 2: mod_base = OTHER; note = 5-methyl
  modified_base 14: mod_base = OTHER; note = 5-methyl
  modified_base 19: mod_base = OTHER; note = 5-methyl
  modified_base 5: mod_base = OTHER; note = bicyclic nucleic acid (BNA)
  modified_base 13: mod_base = OTHER; note = bicyclic nucleic acid (BNA)
  source 1..22: mol_type = other DNA
tcaaggaagatggcatttctag

SEQ ID NO: 11472 - DNA, 22 bp, synthetic construct
  misc_feature 1..22: note = Description of Artificial Sequence: Synthetic Antisense oligonucleotide
  modified_base 2: mod_base = OTHER; note = 5-methyl
  modified_base 14: mod_base = OTHER; note = 5-methyl
  modified_base 19: mod_base = OTHER; note = 5-methyl
  modified_base 2: mod_base = OTHER; note = bicyclic nucleic acid (BNA)
  modified_base 12: mod_base = OTHER; note = bicyclic nucleic acid (BNA)
  source 1..22: mol_type = other DNA
tcaaggaagatggcatttctag

SEQ ID NO: 11473 - DNA, 22 bp, synthetic construct
  misc_feature 1..22: note = Description of Artificial Sequence: Synthetic Antisense oligonucleotide
  modified_base 2: mod_base = OTHER; note = 5-methyl
  modified_base 14: mod_base = OTHER; note = 5-methyl
  modified_base 19: mod_base = OTHER; note = 5-methyl
  modified_base 6: mod_base = OTHER; note = bicyclic nucleic acid (BNA)
  modified_base 9: mod_base = OTHER; note = bicyclic nucleic acid (BNA)
  source 1..22: mol_type = other DNA
tcaaggaagatggcatttctag

SEQ ID NO: 11474 - DNA, 22 bp, synthetic construct
  misc_feature 1..22: note = Description of Artificial Sequence: Synthetic Antisense oligonucleotide
  modified_base 2: mod_base = OTHER; note = 5-methyl
  modified_base 14: mod_base = OTHER; note = 5-methyl
  modified_base 19: mod_base = OTHER; note = 5-methyl
  modified_base 13..14: mod_base = OTHER; note = bicyclic nucleic acid (BNA)
  source 1..22: mol_type = other DNA
tcaaggaagatggcatttctag

SEQ ID NO: 11475 - DNA, 22 bp, synthetic construct
  misc_feature 1..22: note = Description of Artificial Sequence: Synthetic Antisense oligonucleotide
  modified_base 2: mod_base = OTHER; note = 5-methyl
  modified_base 14: mod_base = OTHER; note = 5-methyl
  modified_base 19: mod_base = OTHER; note = 5-methyl
  modified_base 6: mod_base = OTHER; note = bicyclic nucleic acid (BNA)
  modified_base 13: mod_base = OTHER; note = bicyclic nucleic acid (BNA)
  source 1..22: mol_type = other DNA
tcaaggaagatggcatttctag

SEQ ID NO: 11476 - DNA, 22 bp, synthetic construct
  misc_feature 1..22: note = Description of Artificial Sequence: Synthetic Antisense oligonucleotide
  modified_base 2: mod_base = OTHER; note = 5-methyl
  modified_base 14: mod_base = OTHER; note = 5-methyl
  modified_base 19: mod_base = OTHER; note = 5-methyl
  modified_base 6: mod_base = OTHER; note = bicyclic nucleic acid (BNA)
  modified_base 19: mod_base = OTHER; note = bicyclic nucleic acid (BNA)
  source 1..22: mol_type = other DNA
tcaaggaagatggcatttctag

SEQ ID NO: 11477 - DNA, 22 bp, synthetic construct
  misc_feature 1..22: note = Description of Artificial Sequence: Synthetic Antisense oligonucleotide
  modified_base 2: mod_base = OTHER; note = 5-methyl
  modified_base 14: mod_base = OTHER; note = 5-methyl
  modified_base 19: mod_base = OTHER; note = 5-methyl
  modified_base 5: mod_base = OTHER; note = bicyclic nucleic acid (BNA)
  modified_base 14: mod_base = OTHER; note = bicyclic nucleic acid (BNA)
  source 1..22: mol_type = other DNA
tcaaggaagatggcatttctag

SEQ ID NO: 11478 - DNA, 22 bp, synthetic construct
  misc_feature 1..22: note = Description of Artificial Sequence: Synthetic Antisense oligonucleotide
  modified_base 2: mod_base = OTHER; note = 5-methyl
  modified_base 14: mod_base = OTHER; note = 5-methyl
  modified_base 19: mod_base = OTHER; note = 5-methyl
  modified_base 2: mod_base = OTHER; note = bicyclic nucleic acid (BNA)
  modified_base 6: mod_base = OTHER; note = bicyclic nucleic acid (BNA)
  source 1..22: mol_type = other DNA
tcaaggaagatggcatttctag

SEQ ID NO: 11479 - DNA, 22 bp, synthetic construct
  misc_feature 1..22: note = Description of Artificial Sequence: Synthetic Antisense oligonucleotide
  modified_base 2: mod_base = OTHER; note = 5-methyl
  modified_base 14: mod_base = OTHER; note = 5-methyl
  modified_base 19: mod_base = OTHER; note = 5-methyl
  modified_base 12: mod_base = OTHER; note = bicyclic nucleic acid (BNA)
  modified_base 19: mod_base = OTHER; note = bicyclic nucleic acid (BNA)
  source 1..22: mol_type = other DNA
tcaaggaagatggcatttctag

SEQ ID NO: 11480 - DNA, 22 bp, synthetic construct
  misc_feature 1..22: note = Description of Artificial Sequence: Synthetic Antisense oligonucleotide
  modified_base 2: mod_base = OTHER; note = 5-methyl
  modified_base 14: mod_base = OTHER; note = 5-methyl
  modified_base 19: mod_base = OTHER; note = 5-methyl
  modified_base 12: mod_base = OTHER; note = bicyclic nucleic acid (BNA)
  modified_base 14: mod_base = OTHER; note = bicyclic nucleic acid (BNA)
  source 1..22: mol_type = other DNA
tcaaggaagatggcatttctag

SEQ ID NO: 11481 - DNA, 22 bp, synthetic construct
  misc_feature 1..22: note = Description of Artificial Sequence: Synthetic Antisense oligonucleotide
  modified_base 2: mod_base = OTHER; note = 5-methyl
  modified_base 14: mod_base = OTHER; note = 5-methyl
  modified_base 19: mod_base = OTHER; note = 5-methyl
  modified_base 6: mod_base = OTHER; note = bicyclic nucleic acid (BNA)
  modified_base 12: mod_base = OTHER; note = bicyclic nucleic acid (BNA)
  source 1..22: mol_type = other DNA
tcaaggaagatggcatttctag

SEQ ID NO: 11482 - DNA, 22 bp, synthetic construct
  misc_feature 1..22: note = Description of Artificial Sequence: Synthetic Antisense oligonucleotide
  modified_base 2: mod_base = OTHER; note = 5-methyl
  modified_base 14: mod_base = OTHER; note = 5-methyl
  modified_base 19: mod_base = OTHER; note = 5-methyl
  modified_base 5..6: mod_base = OTHER; note = bicyclic nucleic acid (BNA)
  source 1..22: mol_type = other DNA
tcaaggaagatggcatttctag

SEQ ID NO: 11483 - DNA, 22 bp, synthetic construct
  misc_feature 1..22: note = Description of Artificial Sequence: Synthetic Antisense oligonucleotide
  modified_base 2: mod_base = OTHER; note = 5-methyl
  modified_base 14: mod_base = OTHER; note = 5-methyl
  modified_base 19: mod_base = OTHER; note = 5-methyl
  modified_base 2: mod_base = OTHER; note = bicyclic nucleic acid (BNA)
  modified_base 14: mod_base = OTHER; note = bicyclic nucleic acid (BNA)
  source 1..22: mol_type = other DNA
tcaaggaagatggcatttctag

SEQ ID NO: 11484 - DNA, 22 bp, synthetic construct
  misc_feature 1..22: note = Description of Artificial Sequence: Synthetic Antisense oligonucleotide
  modified_base 2: mod_base = OTHER; note = 5-methyl
  modified_base 14: mod_base = OTHER; note = 5-methyl
  modified_base 19: mod_base = OTHER; note = 5-methyl
  modified_base 9: mod_base = OTHER; note = bicyclic nucleic acid (BNA)
  modified_base 12: mod_base = OTHER; note = bicyclic nucleic acid (BNA)
  source 1..22: mol_type = other DNA
tcaaggaagatggcatttctag

SEQ ID NO: 11485 - DNA, 22 bp, synthetic construct
  misc_feature 1..22: note = Description of Artificial Sequence: Synthetic Antisense oligonucleotide
  modified_base 2: mod_base = OTHER; note = 5-methyl
  modified_base 14: mod_base = OTHER; note = 5-methyl
  modified_base 19: mod_base = OTHER; note = 5-methyl
  modified_base 2: mod_base = OTHER; note = bicyclic nucleic acid (BNA)
  modified_base 5: mod_base = OTHER; note = bicyclic nucleic acid (BNA)
  source 1..22: mol_type = other DNA
tcaaggaagatggcatttctag

SEQ ID NO: 11486 - DNA, 22 bp, synthetic construct
  misc_feature 1..22: note = Description of Artificial Sequence: Synthetic Antisense oligonucleotide
  modified_base 2: mod_base = OTHER; note = 5-methyl
  modified_base 14: mod_base = OTHER; note = 5-methyl
  modified_base 19: mod_base = OTHER; note = 5-methyl
  modified_base 13: mod_base = OTHER; note = bicyclic nucleic acid (BNA)
  modified_base 19: mod_base = OTHER; note = bicyclic nucleic acid (BNA)
  source 1..22: mol_type = other DNA
tcaaggaagatggcatttctag

SEQ ID NO: 11487 - DNA, 22 bp, synthetic construct
  misc_feature 1..22: note = Description of Artificial Sequence: Synthetic Antisense oligonucleotide
  modified_base 2: mod_base = OTHER; note = 5-methyl
  modified_base 14: mod_base = OTHER; note = 5-methyl
  modified_base 19: mod_base = OTHER; note = 5-methyl
  modified_base 12..13: mod_base = OTHER; note = bicyclic nucleic acid (BNA)
  source 1..22: mol_type = other DNA
tcaaggaagatggcatttctag

SEQ ID NO: 11488 - DNA, 22 bp, synthetic construct
  misc_feature 1..22: note = Description of Artificial Sequence: Synthetic Antisense oligonucleotide
  modified_base 2: mod_base = OTHER; note = 5-methyl
  modified_base 14: mod_base = OTHER; note = 5-methyl
  modified_base 19: mod_base = OTHER; note = 5-methyl
  modified_base 5: mod_base = OTHER; note = bicyclic nucleic acid (BNA)
  modified_base 12: mod_base = OTHER; note = bicyclic nucleic acid (BNA)
  source 1..22: mol_type = other DNA
tcaaggaagatggcatttctag

SEQ ID NO: 11489 - DNA, 22 bp, synthetic construct
  misc_feature 1..22: note = Description of Artificial Sequence: Synthetic Antisense oligonucleotide
  modified_base 2: mod_base = OTHER; note = 5-methyl
  modified_base 14: mod_base = OTHER; note = 5-methyl
  modified_base 19: mod_base = OTHER; note = 5-methyl
  modified_base 2: mod_base = OTHER; note = bicyclic nucleic acid (BNA)
  modified_base 13: mod_base = OTHER; note = bicyclic nucleic acid (BNA)
  source 1..22: mol_type = other DNA
tcaaggaagatggcatttctag

SEQ ID NO: 11490 - DNA, 22 bp, synthetic construct
  misc_feature 1..22: note = Description of Artificial Sequence: Synthetic Antisense oligonucleotide
  modified_base 2: mod_base = OTHER; note = 5-methyl
  modified_base 14: mod_base = OTHER; note = 5-methyl
  modified_base 19: mod_base = OTHER; note = 5-methyl
  modified_base 9: mod_base = OTHER; note = bicyclic nucleic acid (BNA)
  modified_base 13: mod_base = OTHER; note = bicyclic nucleic acid (BNA)
  source 1..22: mol_type = other DNA
tcaaggaagatggcatttctag

SEQ ID NO: 11491 - DNA, 22 bp, synthetic construct
  misc_feature 1..22: note = Description of Artificial Sequence: Synthetic Antisense oligonucleotide
  modified_base 2: mod_base = OTHER; note = 5-methyl
  modified_base 14: mod_base = OTHER; note = 5-methyl
  modified_base 19: mod_base = OTHER; note = 5-methyl
  modified_base 2: mod_base = OTHER; note = bicyclic nucleic acid (BNA)
  modified_base 19: mod_base = OTHER; note = bicyclic nucleic acid (BNA)
  source 1..22: mol_type = other DNA
tcaaggaagatggcatttctag

SEQ ID NO: 11492 - DNA, 22 bp, synthetic construct
  misc_feature 1..22: note = Description of Artificial Sequence: Synthetic Antisense oligonucleotide
  modified_base 2: mod_base = OTHER; note = 5-methyl
  modified_base 14: mod_base = OTHER; note = 5-methyl
  modified_base 19: mod_base = OTHER; note = 5-methyl
  modified_base 2: mod_base = OTHER; note = bicyclic nucleic acid (BNA)
  modified_base 9: mod_base = OTHER; note = bicyclic nucleic acid (BNA)
  source 1..22: mol_type = other DNA
tcaaggaagatggcatttctag

SEQ ID NO: 11493 - DNA, 22 bp, synthetic construct
  misc_feature 1..22: note = Description of Artificial Sequence: Synthetic Antisense oligonucleotide
  modified_base 2: mod_base = OTHER; note = 5-methyl
  modified_base 14: mod_base = OTHER; note = 5-methyl
  modified_base 19: mod_base = OTHER; note = 5-methyl
  modified_base 14: mod_base = OTHER; note = bicyclic nucleic acid (BNA)
  modified_base 19: mod_base = OTHER; note = bicyclic nucleic acid (BNA)
  source 1..22: mol_type = other DNA
tcaaggaagatggcatttctag

SEQ ID NO: 11494 - DNA, 22 bp, synthetic construct
  misc_feature 1..22: note = Description of Artificial Sequence: Synthetic Antisense oligonucleotide
  modified_base 2: mod_base = OTHER; note = 5-methyl
  modified_base 14: mod_base = OTHER; note = 5-methyl
  modified_base 19: mod_base = OTHER; note = 5-methyl
  modified_base 9: mod_base = OTHER; note = bicyclic nucleic acid (BNA)
  modified_base 19: mod_base = OTHER; note = bicyclic nucleic acid (BNA)
  source 1..22: mol_type = other DNA
tcaaggaagatggcatttctag

SEQ ID NO: 11495 - RNA, 18 nt, synthetic construct
  misc_feature 1..18: note = Description of Artificial Sequence: Synthetic Antisense oligonucleotide
  modified_base 1: mod_base = OTHER; note = bicyclic nucleic acid (BNA)
  modified_base 9: mod_base = OTHER; note = bicyclic nucleic acid (BNA)
  source 1..18: mol_type = other RNA
ggtaagttctgtccaagc

SEQ ID NO: 11496 - RNA, 18 nt, synthetic construct
  misc_feature 1..18: note = Description of Artificial Sequence: Synthetic Antisense oligonucleotide
  modified_base 1: mod_base = OTHER; note = bicyclic nucleic acid (BNA)
  modified_base 11: mod_base = OTHER; note = bicyclic nucleic acid (BNA)
  source 1..18: mol_type = other RNA
ggtaagttctgtccaagc

SEQ ID NO: 11497 - RNA, 18 nt, synthetic construct
  misc_feature 1..18: note = Description of Artificial Sequence: Synthetic Antisense oligonucleotide
  modified_base 1: mod_base = OTHER; note = bicyclic nucleic acid (BNA)
  modified_base 6: mod_base = OTHER; note = bicyclic nucleic acid (BNA)
  source 1..18: mol_type = other RNA
ggtaagttctgtccaagc

SEQ ID NO: 11498 - RNA, 18 nt, synthetic construct
  misc_feature 1..18: note = Description of Artificial Sequence: Synthetic Antisense oligonucleotide
  modified_base 1: mod_base = OTHER; note = bicyclic nucleic acid (BNA)
  modified_base 17: mod_base = OTHER; note = bicyclic nucleic acid (BNA)
  source 1..18: mol_type = other RNA
ggtaagttctgtccaagc

SEQ ID NO: 11499 - RNA, 18 nt, synthetic construct
  misc_feature 1..18: note = Description of Artificial Sequence: Synthetic Antisense oligonucleotide
  modified_base 1: mod_base = OTHER; note = bicyclic nucleic acid (BNA)
  modified_base 13: mod_base = OTHER; note = bicyclic nucleic acid (BNA)
  source 1..18: mol_type = other RNA
ggtaagttctgtccaagc

SEQ ID NO: 11500 - RNA, 18 nt, synthetic construct
  misc_feature 1..18: note = Description of Artificial Sequence: Synthetic Antisense oligonucleotide
  modified_base 1: mod_base = OTHER; note = bicyclic nucleic acid (BNA)
  modified_base 14: mod_base = OTHER; note = bicyclic nucleic acid (BNA)
  source 1..18: mol_type = other RNA
ggtaagttctgtccaagc

SEQ ID NO: 11501 - RNA, 18 nt, synthetic construct
  misc_feature 1..18: note = Description of Artificial Sequence: Synthetic Antisense oligonucleotide
  modified_base 1: mod_base = OTHER; note = bicyclic nucleic acid (BNA)
  modified_base 16: mod_base = OTHER; note = bicyclic nucleic acid (BNA)
  source 1..18: mol_type = other RNA
gtaagttctgtccaagcc

SEQ ID NO: 11502 - RNA, 18 nt, synthetic construct
  misc_feature 1..18: note = Description of Artificial Sequence: Synthetic Antisense oligonucleotide
  modified_base 1: mod_base = OTHER; note = bicyclic nucleic acid (BNA)
  modified_base 10: mod_base = OTHER; note = bicyclic nucleic acid (BNA)
  source 1..18: mol_type = other RNA
gtaagttctgtccaagcc

SEQ ID NO: 11503 - RNA, 18 nt, synthetic construct
  misc_feature 1..18: note = Description of Artificial Sequence: Synthetic Antisense oligonucleotide
  modified_base 1: mod_base = OTHER; note = bicyclic nucleic acid (BNA)
  modified_base 5: mod_base = OTHER; note = bicyclic nucleic acid (BNA)
  source 1..18: mol_type = other RNA
gtaagttctgtccaagcc

SEQ ID NO: 11504 - RNA, 18 nt, synthetic construct
  misc_feature 1..18: note = Description of Artificial Sequence: Synthetic Antisense oligonucleotide
  modified_base 1: mod_base = OTHER; note = bicyclic nucleic acid (BNA)
  modified_base 17: mod_base = OTHER; note = bicyclic nucleic acid (BNA)
  source 1..18: mol_type = other RNA
gtaagttctgtccaagcc

SEQ ID NO: 11505 - RNA, 18 nt, synthetic construct
  misc_feature 1..18: note = Description of Artificial Sequence: Synthetic Antisense oligonucleotide
  modified_base 1: mod_base = OTHER; note = bicyclic nucleic acid (BNA)
  modified_base 12: mod_base = OTHER; note = bicyclic nucleic acid (BNA)
  source 1..18: mol_type = other RNA
gtaagttctgtccaagcc

SEQ ID NO: 11506 - RNA, 18 nt, synthetic construct
  misc_feature 1..18: note = Description of Artificial Sequence: Synthetic Antisense oligonucleotide
  modified_base 1: mod_base = OTHER; note = bicyclic nucleic acid (BNA)
  modified_base 13: mod_base = OTHER; note = bicyclic nucleic acid (BNA)
  source 1..18: mol_type = other RNA
gtaagttctgtccaagcc

SEQ ID NO: 11507 - RNA, 18 nt, synthetic construct
  misc_feature 1..18: note = Description of Artificial Sequence: Synthetic Antisense oligonucleotide
  modified_base 1: mod_base = OTHER; note = bicyclic nucleic acid (BNA)
  modified_base 8: mod_base = OTHER; note = bicyclic nucleic acid (BNA)
  source 1..18: mol_type = other RNA
gtaagttctgtccaagcc

SEQ ID NO: 11508 - RNA, 18 nt, synthetic construct
  misc_feature 1..18: note = Description of Artificial Sequence: Synthetic Antisense oligonucleotide
  modified_base 1: mod_base = OTHER; note = bicyclic nucleic acid (BNA)
  modified_base 4: mod_base = OTHER; note = bicyclic nucleic acid (BNA)
  source 1..18: mol_type = other RNA
agtcggtaagttctgtcc

SEQ ID NO: 11509 - RNA, 18 nt, synthetic construct
  misc_feature 1..18: note = Description of Artificial Sequence: Synthetic Antisense oligonucleotide
  modified_base 1: mod_base = OTHER; note = bicyclic nucleic acid (BNA)
  modified_base 10: mod_base = OTHER; note = bicyclic nucleic acid (BNA)
  source 1..18: mol_type = other RNA
agtcggtaagttctgtcc

SEQ ID NO: 11510 - RNA, 18 nt, synthetic construct
  misc_feature 1..18: note = Description of Artificial Sequence: Synthetic Antisense oligonucleotide
  modified_base 1: mod_base = OTHER; note = bicyclic nucleic acid (BNA)
  modified_base 5: mod_base = OTHER; note = bicyclic nucleic acid (BNA)
  source 1..18: mol_type = other RNA
agtcggtaagttctgtcc

SEQ ID NO: 11511 - RNA, 18 nt, synthetic construct
  misc_feature 1..18: note = Description of Artificial Sequence: Synthetic Antisense oligonucleotide
  modified_base 1: mod_base = OTHER; note = bicyclic nucleic acid (BNA)
  modified_base 6: mod_base = OTHER; note = bicyclic nucleic acid (BNA)
  source 1..18: mol_type = other RNA
agtcggtaagttctgtcc

SEQ ID NO: 11512 - RNA, 18 nt, synthetic construct
  misc_feature 1..18: note = Description of Artificial Sequence: Synthetic Antisense oligonucleotide
  modified_base 1: mod_base = OTHER; note = bicyclic nucleic acid (BNA)
  modified_base 17: mod_base = OTHER; note = bicyclic nucleic acid (BNA)
  source 1..18: mol_type = other RNA
agtcggtaagttctgtcc

SEQ ID NO: 11513 - RNA, 18 nt, synthetic construct
  misc_feature 1..18: note = Description of Artificial Sequence: Synthetic Antisense oligonucleotide
  modified_base 1: mod_base = OTHER; note = bicyclic nucleic acid (BNA)
  modified_base 13: mod_base = OTHER; note = bicyclic nucleic acid (BNA)
  source 1..18: mol_type = other RNA
agtcggtaagttctgtcc

SEQ ID NO: 11514 - RNA, 18 nt, synthetic construct
  misc_feature 1..18: note = Description of Artificial Sequence: Synthetic Antisense oligonucleotide
  modified_base 1: mod_base = OTHER; note = bicyclic nucleic acid (BNA)
  modified_base 15: mod_base = OTHER; note = bicyclic nucleic acid (BNA)
  source 1..18: mol_type = other RNA
agtcggtaagttctgtcc

SEQ ID NO: 11515 - RNA, 18 nt, synthetic construct
  misc_feature 1..18: note = Description of Artificial Sequence: Synthetic Antisense oligonucleotide
  modified_base 1: mod_base = OTHER; note = bicyclic nucleic acid (BNA)
  modified_base 3: mod_base = OTHER; note = bicyclic nucleic acid (BNA)
  source 1..18: mol_type = other RNA
ctgtccaagcccggttga

SEQ ID NO: 11516 - RNA, 18 nt, synthetic construct
  misc_feature 1..18: note = Description of Artificial Sequence: Synthetic Antisense oligonucleotide
  modified_base 1: mod_base = OTHER; note = bicyclic nucleic acid (BNA)
  modified_base 9: mod_base = OTHER; note = bicyclic nucleic acid (BNA)
  source 1..18: mol_type = other RNA
ctgtccaagcccggttga

SEQ ID NO: 11517 - RNA, 18 nt, synthetic construct
  misc_feature 1..18: note = Description of Artificial Sequence: Synthetic Antisense oligonucleotide
  modified_base 1: mod_base = OTHER; note = bicyclic nucleic acid (BNA)
  modified_base 10: mod_base = OTHER; note = bicyclic nucleic acid (BNA)
  source 1..18: mol_type = other RNA
ctgtccaagcccggttga

SEQ ID NO: 11518 - RNA, 18 nt, synthetic construct
  misc_feature 1..18: note = Description of Artificial Sequence: Synthetic Antisense oligonucleotide
  modified_base 1: mod_base = OTHER; note = bicyclic nucleic acid (BNA)
  modified_base 5: mod_base = OTHER; note = bicyclic nucleic acid (BNA)
  source 1..18: mol_type = other RNA
ctgtccaagcccggttga

SEQ ID NO: 11519 - RNA, 18 nt, synthetic construct
  misc_feature 1..18: note = Description of Artificial Sequence: Synthetic Antisense oligonucleotide
  modified_base 1: mod_base = OTHER; note = bicyclic nucleic acid (BNA)
  modified_base 11: mod_base = OTHER; note = bicyclic nucleic acid (BNA)
  source 1..18: mol_type = other RNA
ctgtccaagcccggttga

SEQ ID NO: 11520 - RNA, 18 nt, synthetic construct
  misc_feature 1..18: note = Description of Artificial Sequence: Synthetic Antisense oligonucleotide
  modified_base 1: mod_base = OTHER; note = bicyclic nucleic acid (BNA)
  modified_base 6: mod_base = OTHER; note = bicyclic nucleic acid (BNA)
  source 1..18: mol_type = other RNA
ctgtccaagcccggttga

SEQ ID NO: 11521 - RNA, 18 nt, synthetic construct
  misc_feature 1..18: note = Description of Artificial Sequence: Synthetic Antisense oligonucleotide
  modified_base 1: mod_base = OTHER; note = bicyclic nucleic acid (BNA)
  modified_base 17: mod_base = OTHER; note = bicyclic nucleic acid (BNA)
  source 1..18: mol_type = other RNA
ctgtccaagcccggttga

SEQ ID NO: 11522 - RNA, 18 nt, synthetic construct
  misc_feature 1..18: note = Description of Artificial Sequence: Synthetic Antisense oligonucleotide
  modified_base 1: mod_base = OTHER; note = bicyclic nucleic acid (BNA)
  modified_base 12: mod_base = OTHER; note = bicyclic nucleic acid (BNA)
  source 1..18: mol_type = other RNA
ctgtccaagcccggttga

SEQ ID NO: 11523 - RNA, 18 nt, synthetic construct
  misc_feature 1..18: note = Description of Artificial Sequence: Synthetic Antisense oligonucleotide
  modified_base 1: mod_base = OTHER; note = bicyclic nucleic acid (BNA)
  modified_base 13: mod_base = OTHER; note = bicyclic nucleic acid (BNA)
  source 1..18: mol_type = other RNA
ctgtccaagcccggttga

SEQ ID NO: 11524 - RNA, 18 nt, synthetic construct
  misc_feature 1..18: note = Description of Artificial Sequence: Synthetic Antisense oligonucleotide
  modified_base 1: mod_base = OTHER; note = bicyclic nucleic acid (BNA)
  modified_base 14: mod_base = OTHER; note = bicyclic nucleic acid (BNA)
  source 1..18: mol_type = other RNA
ctgtccaagcccggttga

SEQ ID NO: 11525 - RNA, 18 nt, synthetic construct
  misc_feature 1..18: note = Description of Artificial Sequence: Synthetic Antisense oligonucleotide
  modified_base 1: mod_base = OTHER; note = bicyclic nucleic acid (BNA)
  modified_base 6: mod_base = OTHER; note = bicyclic nucleic acid (BNA)
  modified_base 11: mod_base = OTHER; note = bicyclic nucleic acid (BNA)
  source 1..18: mol_type = other RNA
ggtaagttctgtccaagc

SEQ ID NO: 11526 - RNA, 18 nt, synthetic construct
  misc_feature 1..18: note = Description of Artificial Sequence: Synthetic Antisense oligonucleotide
  modified_base 1: mod_base = OTHER; note = bicyclic nucleic acid (BNA)
  modified_base 9: mod_base = OTHER; note = bicyclic nucleic acid (BNA)
  modified_base 14: mod_base = OTHER; note = bicyclic nucleic acid (BNA)
  source 1..18: mol_type = other RNA
ggtaagttctgtccaagc

SEQ ID NO: 11527 - RNA, 18 nt, synthetic construct
  misc_feature 1..18: note = Description of Artificial Sequence: Synthetic Antisense oligonucleotide
  modified_base 1: mod_base = OTHER; note = bicyclic nucleic acid (BNA)
  modified_base 6: mod_base = OTHER; note = bicyclic nucleic acid (BNA)
  modified_base 17: mod_base = OTHER; note = bicyclic nucleic acid (BNA)
  source 1..18: mol_type = other RNA
ggtaagttctgtccaagc

SEQ ID NO: 11528 - RNA, 18 nt, synthetic construct
  misc_feature 1..18: note = Description of Artificial Sequence: Synthetic Antisense oligonucleotide
  modified_base 1: mod_base = OTHER; note = bicyclic nucleic acid (BNA)
  modified_base 9: mod_base = OTHER; note = bicyclic nucleic acid (BNA)
  modified_base 13: mod_base = OTHER; note = bicyclic nucleic acid (BNA)
  source 1..18: mol_type = other RNA
ggtaagttctgtccaagc

SEQ ID NO: 11529 - RNA, 18 nt, synthetic construct
  misc_feature 1..18: note = Description of Artificial Sequence: Synthetic Antisense oligonucleotide
  modified_base 1: mod_base = OTHER; note = bicyclic nucleic acid (BNA)
  modified_base 13..14: mod_base = OTHER; note = bicyclic nucleic acid (BNA)
  source 1..18: mol_type = other RNA
ggtaagttctgtccaagc

SEQ ID NO: 11530 - RNA, 18 nt, synthetic construct
  misc_feature 1..18: note = Description of Artificial Sequence: Synthetic Antisense oligonucleotide
  modified_base 1: mod_base = OTHER; note = bicyclic nucleic acid (BNA)
  modified_base 11: mod_base = OTHER; note = bicyclic nucleic acid (BNA)
  modified_base 17: mod_base = OTHER; note = bicyclic nucleic acid (BNA)
  source 1..18: mol_type = other RNA
ggtaagttctgtccaagc

SEQ ID NO: 11531 - RNA, 18 nt, synthetic construct
  misc_feature 1..18: note = Description of Artificial Sequence: Synthetic Antisense oligonucleotide
  modified_base 1: mod_base = OTHER; note = bicyclic nucleic acid (BNA)
  modified_base 11: mod_base = OTHER; note = bicyclic nucleic acid (BNA)
  modified_base 14: mod_base = OTHER; note = bicyclic nucleic acid (BNA)
  source 1..18: mol_type = other RNA
ggtaagttctgtccaagc

SEQ ID NO: 11532 - RNA, 18 nt, synthetic construct
  misc_feature 1..18: note = Description of Artificial Sequence: Synthetic Antisense oligonucleotide
  modified_base 1: mod_base = OTHER; note = bicyclic nucleic acid (BNA)
  modified_base 6: mod_base = OTHER; note = bicyclic nucleic acid (BNA)
  modified_base 13: mod_base = OTHER; note = bicyclic nucleic acid (BNA)
  source 1..18: mol_type = other RNA
ggtaagttctgtccaagc

SEQ ID NO: 11533 - RNA, 18 nt, synthetic construct
  misc_feature 1..18: note = Description of Artificial Sequence: Synthetic Antisense oligonucleotide
  modified_base 1: mod_base = OTHER; note = bicyclic nucleic acid (BNA)
  modified_base 6: mod_base = OTHER; note = bicyclic nucleic acid (BNA)
  modified_base 14: mod_base = OTHER; note = bicyclic nucleic acid (BNA)
  source 1..18: mol_type = other RNA
ggtaagttctgtccaagc

SEQ ID NO: 11534 - RNA, 18 nt, synthetic construct
  misc_feature 1..18: note = Description of Artificial Sequence: Synthetic Antisense oligonucleotide
  modified_base 1: mod_base = OTHER; note = bicyclic nucleic acid (BNA)
  modified_base 14: mod_base = OTHER; note = bicyclic nucleic acid (BNA)
  modified_base 17: mod_base = OTHER; note = bicyclic nucleic acid (BNA)
  source 1..18: mol_type = other RNA
ggtaagttctgtccaagc

SEQ ID NO: 11535 - RNA, 18 nt, synthetic construct
  misc_feature 1..18: note = Description of Artificial Sequence: Synthetic Antisense oligonucleotide
  modified_base 1: mod_base = OTHER; note = bicyclic nucleic acid (BNA)
  modified_base 9: mod_base = OTHER; note = bicyclic nucleic acid (BNA)
  modified_base 11: mod_base = OTHER; note = bicyclic nucleic acid (BNA)
  source 1..18: mol_type = other RNA
ggtaagttctgtccaagc

SEQ ID NO: 11536 - RNA, 18 nt, synthetic construct
  misc_feature 1..18: note = Description of Artificial Sequence: Synthetic Antisense oligonucleotide
  modified_base 1: mod_base = OTHER; note = bicyclic nucleic acid (BNA)
  modified_base 11: mod_base = OTHER; note = bicyclic nucleic acid (BNA)
  modified_base 13: mod_base = OTHER; note = bicyclic nucleic acid (BNA)
  source 1..18: mol_type = other RNA
ggtaagttctgtccaagc

SEQ ID NO: 11537 - RNA, 18 nt, synthetic construct
  misc_feature 1..18: note = Description of Artificial Sequence: Synthetic Antisense oligonucleotide
  modified_base 1: mod_base = OTHER; note = bicyclic nucleic acid (BNA)
  modified_base 13: mod_base = OTHER; note = bicyclic nucleic acid (BNA)
  modified_base 17: mod_base = OTHER; note = bicyclic nucleic acid (BNA)
  source 1..18: mol_type = other RNA
ggtaagttctgtccaagc

SEQ ID NO: 11538 - RNA, 18 nt, synthetic construct
  misc_feature 1..18: note = Description of Artificial Sequence: Synthetic Antisense oligonucleotide
  modified_base 1: mod_base = OTHER; note = bicyclic nucleic acid (BNA)
  modified_base 9: mod_base = OTHER; note = bicyclic nucleic acid (BNA)
  modified_base 17: mod_base = OTHER; note = bicyclic nucleic acid (BNA)
  source 1..18: mol_type = other RNA
ggtaagttctgtccaagc

SEQ ID NO: 11539 - RNA, 18 nt, synthetic construct
  misc_feature 1..18: note = Description of Artificial Sequence: Synthetic Antisense oligonucleotide
  modified_base 1: mod_base = OTHER; note = bicyclic nucleic acid (BNA)
  modified_base 6: mod_base = OTHER; note = bicyclic nucleic acid (BNA)
  modified_base 9: mod_base = OTHER; note = bicyclic nucleic acid (BNA)
  source 1..18: mol_type = other RNA
ggtaagttctgtccaagc

SEQ ID NO: 11540 - RNA, 18 nt, synthetic construct
  misc_feature 1..18: note = Description of Artificial Sequence: Synthetic Antisense oligonucleotide
  modified_base 1: mod_base = OTHER; note = bicyclic nucleic acid (BNA)
  modified_base 12: mod_base = OTHER; note = bicyclic nucleic acid (BNA)
  modified_base 17: mod_base = OTHER; note = bicyclic nucleic acid (BNA)
  source 1..18: mol_type = other RNA
gtaagttctgtccaagcc

SEQ ID NO: 11541 - RNA, 18 nt, synthetic construct
  misc_feature 1..18: note = Description of Artificial Sequence: Synthetic Antisense oligonucleotide
  modified_base 1: mod_base = OTHER; note = bicyclic nucleic acid (BNA)
  modified_base 5: mod_base = OTHER; note = bicyclic nucleic acid (BNA)
  modified_base 8: mod_base = OTHER; note = bicyclic nucleic acid (BNA)
  source 1..18: mol_type = other RNA
gtaagttctgtccaagcc

SEQ ID NO: 11542 - RNA, 18 nt, synthetic construct
  misc_feature 1..18: note = Description of Artificial Sequence: Synthetic Antisense oligonucleotide
  modified_base 1: mod_base = OTHER; note = bicyclic nucleic acid (BNA)
  modified_base 8: mod_base = OTHER; note = bicyclic nucleic acid (BNA)
  modified_base 13: mod_base = OTHER; note = bicyclic nucleic acid (BNA)
  source 1..18: mol_type = other RNA
gtaagttctgtccaagcc

SEQ ID NO: 11543 - RNA, 18 nt, synthetic construct
  misc_feature 1..18: note = Description of Artificial Sequence: Synthetic Antisense oligonucleotide
  modified_base 1: mod_base = OTHER; note = bicyclic nucleic acid (BNA)
  modified_base 5: mod_base = OTHER; note = bicyclic nucleic acid (BNA)
  modified_base 13: mod_base = OTHER; note = bicyclic nucleic acid (BNA)
  source 1..18: mol_type = other RNA
gtaagttctgtccaagcc

SEQ ID NO: 11544 - RNA, 18 nt, synthetic construct
  misc_feature 1..18: note = Description of Artificial Sequence: Synthetic Antisense oligonucleotide
  modified_base 1: mod_base = OTHER; note = bicyclic nucleic acid (BNA)
  modified_base 8: mod_base = OTHER; note = bicyclic nucleic acid (BNA)
  modified_base 17: mod_base = OTHER; note = bicyclic nucleic acid (BNA)
  source 1..18: mol_type = other RNA
gtaagttctgtccaagcc

SEQ ID NO: 11545 - RNA, 18 nt, synthetic construct
  misc_feature 1..18: note = Description of Artificial Sequence: Synthetic Antisense oligonucleotide
  modified_base 1: mod_base = OTHER; note = bicyclic nucleic acid (BNA)
  modified_base 13: mod_base = OTHER; note = bicyclic nucleic acid (BNA)
  modified_base 17: mod_base = OTHER; note = bicyclic nucleic acid (BNA)
  source 1..18: mol_type = other RNA
gtaagttctgtccaagcc

SEQ ID NO: 11546 - RNA, 18 nt, synthetic construct
  misc_feature 1..18: note = Description of Artificial Sequence: Synthetic Antisense oligonucleotide
  modified_base 1: mod_base = OTHER; note = bicyclic nucleic acid (BNA)
  modified_base 8: mod_base = OTHER; note = bicyclic nucleic acid (BNA)
  modified_base 12: mod_base = OTHER; note = bicyclic nucleic acid (BNA)
  source 1..18: mol_type = other RNA
gtaagttctgtccaagcc

SEQ ID NO: 11547 - RNA, 18 nt, synthetic construct
  misc_feature 1..18: note = Description of Artificial Sequence: Synthetic Antisense oligonucleotide
  modified_base 1: mod_base = OTHER; note = bicyclic nucleic acid (BNA)
  modified_base 5: mod_base = OTHER; note = bicyclic nucleic acid (BNA)
  modified_base 10: mod_base = OTHER; note = bicyclic nucleic acid (BNA)
  source 1..18: mol_type = other RNA
gtaagttctgtccaagcc

SEQ ID NO: 11548 - RNA, 18 nt, synthetic construct
  misc_feature 1..18: note = Description of Artificial Sequence: Synthetic Antisense oligonucleotide
  modified_base 1: mod_base = OTHER; note = bicyclic nucleic acid (BNA)
  modified_base 8: mod_base = OTHER; note = bicyclic nucleic acid (BNA)
  modified_base 16: mod_base = OTHER; note = bicyclic nucleic acid (BNA)
  source 1..18: mol_type = other RNA
gtaagttctgtccaagcc

SEQ ID NO: 11549 - RNA, 18 nt, synthetic construct
  misc_feature 1..18: note = Description of Artificial Sequence: Synthetic Antisense oligonucleotide
  modified_base 1: mod_base = OTHER; note = bicyclic nucleic acid (BNA)
  modified_base 10: mod_base = OTHER; note = bicyclic nucleic acid (BNA)
  modified_base 16: mod_base = OTHER; note = bicyclic nucleic acid (BNA)
  source 1..18: mol_type = other RNA
gtaagttctgtccaagcc

SEQ ID NO: 11550 - RNA, 18 nt, synthetic construct
  misc_feature 1..18: note = Description of Artificial Sequence: Synthetic Antisense oligonucleotide
  modified_base 1: mod_base = OTHER; note = bicyclic nucleic acid (BNA)
  modified_base 10: mod_base = OTHER; note = bicyclic nucleic acid (BNA)
  modified_base 12: mod_base = OTHER; note = bicyclic nucleic acid (BNA)
  source 1..18: mol_type = other RNA
gtaagttctgtccaagcc

SEQ ID NO: 11551 - RNA, 18 nt, synthetic construct
  misc_feature 1..18: note = Description of Artificial Sequence: Synthetic Antisense oligonucleotide
  modified_base 1: mod_base = OTHER; note = bicyclic nucleic acid (BNA)
  modified_base 5: mod_base = OTHER; note = bicyclic nucleic acid (BNA)
  modified_base 17: mod_base = OTHER; note = bicyclic nucleic acid (BNA)
  source 1..18: mol_type = other RNA
gtaagttctgtccaagcc

SEQ ID NO: 11552 - RNA, 18 nt, synthetic construct
  misc_feature 1..18: note = Description of Artificial Sequence: Synthetic Antisense oligonucleotide
  modified_base 1: mod_base = OTHER; note = bicyclic nucleic acid (BNA)
  modified_base 10: mod_base = OTHER; note = bicyclic nucleic acid (BNA)
  modified_base 17: mod_base = OTHER; note = bicyclic nucleic acid (BNA)
  source 1..18: mol_type = other RNA
gtaagttctgtccaagcc

SEQ ID NO: 11553 - RNA, 18 nt, synthetic construct
  misc_feature 1..18: note = Description of Artificial Sequence: Synthetic Antisense oligonucleotide
  modified_base 1: mod_base = OTHER; note = bicyclic nucleic acid (BNA)
  modified_base 12..13: mod_base = OTHER; note = bicyclic nucleic acid (BNA)
  source 1..18: mol_type = other RNA
gtaagttctgtccaagcc

SEQ ID NO: 11554 - RNA, 18 nt, synthetic construct
  misc_feature 1..18: note = Description of Artificial Sequence: Synthetic Antisense oligonucleotide
  modified_base 1: mod_base = OTHER; note = bicyclic nucleic acid (BNA)
  modified_base 5: mod_base = OTHER; note = bicyclic nucleic acid (BNA)
  modified_base 12: mod_base = OTHER; note = bicyclic nucleic acid (BNA)
  source 1..18: mol_type = other RNA
gtaagttctgtccaagcc

SEQ ID NO: 11555 - RNA, 18 nt, synthetic construct
  misc_feature 1..18: note = Description of Artificial Sequence: Synthetic Antisense oligonucleotide
  modified_base 1: mod_base = OTHER; note = bicyclic nucleic acid (BNA)
  modified_base 8: mod_base = OTHER; note = bicyclic nucleic acid (BNA)
  modified_base 10: mod_base = OTHER; note = bicyclic nucleic acid (BNA)
  source 1..18: mol_type = other RNA
gtaagttctgtccaagcc

SEQ ID NO: 11556 - RNA, 18 nt, synthetic construct
  misc_feature 1..18: note = Description of Artificial Sequence: Synthetic Antisense oligonucleotide
  modified_base 1: mod_base = OTHER; note = bicyclic nucleic acid (BNA)
  modified_base 13: mod_base = OTHER; note = bicyclic nucleic acid (BNA)
  modified_base 16: mod_base = OTHER; note = bicyclic nucleic acid (BNA)
  source 1..18: mol_type = other RNA
gtaagttctgtccaagcc

SEQ ID NO: 11557 - RNA, 18 nt, synthetic construct
  misc_feature 1..18: note = Description of Artificial Sequence: Synthetic Antisense oligonucleotide
  modified_base 1: mod_base = OTHER; note = bicyclic nucleic acid (BNA)
  modified_base 5: mod_base = OTHER; note = bicyclic nucleic acid (BNA)
  modified_base 16: mod_base = OTHER; note = bicyclic nucleic acid (BNA)
  source 1..18: mol_type = other RNA
gtaagttctgtccaagcc

SEQ ID NO: 11558 - RNA, 18 nt, synthetic construct
  misc_feature 1..18: note = Description of Artificial Sequence: Synthetic Antisense oligonucleotide
  modified_base 1: mod_base = OTHER; note = bicyclic nucleic acid (BNA)
  modified_base 12: mod_base = OTHER; note = bicyclic nucleic acid (BNA)
  modified_base 16: mod_base = OTHER; note = bicyclic nucleic acid (BNA)
  source 1..18: mol_type = other RNA
gtaagttctgtccaagcc

SEQ ID NO: 11559 - RNA, 18 nt, synthetic construct
  misc_feature 1..18: note = Description of Artificial Sequence: Synthetic Antisense oligonucleotide
  modified_base 1: mod_base = OTHER; note = bicyclic nucleic acid (BNA)
  modified_base 16..17: mod_base = OTHER; note = bicyclic nucleic acid (BNA)
  source 1..18: mol_type = other RNA
gtaagttctgtccaagcc

SEQ ID NO: 11560 - RNA, 18 nt, synthetic construct
  misc_feature 1..18: note = Description of Artificial Sequence: Synthetic Antisense oligonucleotide
  modified_base 1: mod_base = OTHER; note = bicyclic nucleic acid (BNA)
  modified_base 10: mod_base = OTHER; note = bicyclic nucleic acid (BNA)
  modified_base 13: mod_base = OTHER; note = bicyclic nucleic acid (BNA)
  source 1..18: mol_type = other RNA
gtaagttctgtccaagcc

SEQ ID NO: 11561 - RNA, 18 nt, synthetic construct
  misc_feature 1..18: note = Description of Artificial Sequence: Synthetic Antisense oligonucleotide
  modified_base 1: mod_base = OTHER; note = bicyclic nucleic acid (BNA)
  modified_base 6: mod_base = OTHER; note = bicyclic nucleic acid (BNA)
  modified_base 10: mod_base = OTHER; note = bicyclic nucleic acid (BNA)
  source 1..18: mol_type = other RNA
agtcggtaagttctgtcc

SEQ ID NO: 11562 - RNA, 18 nt, synthetic construct
  misc_feature 1..18: note = Description of Artificial Sequence: Synthetic Antisense oligonucleotide
  modified_base 1: mod_base = OTHER; note = bicyclic nucleic acid (BNA)
  modified_base 5: mod_base = OTHER; note = bicyclic nucleic acid (BNA)
  modified_base 13: mod_base = OTHER; note = bicyclic nucleic acid (BNA)
  source 1..18: mol_type = other RNA
agtcggtaagttctgtcc

SEQ ID NO: 11563 - RNA, 18 nt, synthetic construct
  misc_feature 1..18: note = Description of Artificial Sequence: Synthetic Antisense oligonucleotide
  modified_base 1: mod_base = OTHER; note = bicyclic nucleic acid (BNA)
  modified_base 13: mod_base = OTHER; note = bicyclic nucleic acid (BNA)
  modified_base 17: mod_base = OTHER; note = bicyclic nucleic acid (BNA)
  source 1..18: mol_type = other RNA
agtcggtaagttctgtcc

SEQ ID NO: 11564 - RNA, 18 nt, synthetic construct
  misc_feature 1..18: note = Description of Artificial Sequence: Synthetic Antisense oligonucleotide
  modified_base 1: mod_base = OTHER; note = bicyclic nucleic acid (BNA)
  modified_base 4: mod_base = OTHER; note = bicyclic nucleic acid (BNA)
  modified_base 15: mod_base = OTHER; note = bicyclic nucleic acid (BNA)
  source 1..18: mol_type = other RNA
agtcggtaagttctgtcc

SEQ ID NO: 11565 - RNA, 18 nt, synthetic construct
  misc_feature 1..18: note = Description of Artificial Sequence: Synthetic Antisense oligonucleotide
  modified_base 1: mod_base = OTHER; note = bicyclic nucleic acid (BNA)
  modified_base 5: mod_base = OTHER; note = bicyclic nucleic acid (BNA)
  modified_base 10: mod_base = OTHER; note = bicyclic nucleic acid (BNA)
  source 1..18: mol_type = other RNA
agtcggtaagttctgtcc

SEQ ID NO: 11566 - RNA, 18 nt, synthetic construct
  misc_feature 1..18: note = Description of Artificial Sequence: Synthetic Antisense oligonucleotide
  modified_base 1: mod_base = OTHER; note = bicyclic nucleic acid (BNA)
  modified_base 6: mod_base = OTHER; note = bicyclic nucleic acid (BNA)
  modified_base 13: mod_base = OTHER; note = bicyclic nucleic acid (BNA)
  source 1..18: mol_type = other RNA
agtcggtaagttctgtcc

SEQ ID NO: 11567 - RNA, 18 nt, synthetic construct
  misc_feature 1..18: note = Description of Artificial Sequence: Synthetic Antisense oligonucleotide
  modified_base 1: mod_base = OTHER; note = bicyclic nucleic acid (BNA)
  modified_base 4: mod_base = OTHER; note = bicyclic nucleic acid (BNA)
  modified_base 17: mod_base = OTHER; note = bicyclic nucleic acid (BNA)
  source 1..18: mol_type = other RNA
agtcggtaagttctgtcc

SEQ ID NO: 11568 - RNA, 18 nt, synthetic construct
  misc_feature 1..18: note = Description of Artificial Sequence: Synthetic Antisense oligonucleotide
  modified_base 1: mod_base = OTHER; note = bicyclic nucleic acid (BNA)
  modified_base 10: mod_base = OTHER; note = bicyclic nucleic acid (BNA)
  modified_base 15: mod_base = OTHER; note = bicyclic nucleic acid (BNA)
  source 1..18: mol_type = other RNA
agtcggtaagttctgtcc

SEQ ID NO: 11569 - RNA, 18 nt, synthetic construct
  misc_feature 1..18: note = Description of Artificial Sequence: Synthetic Antisense oligonucleotide
  modified_base 1: mod_base = OTHER; note = bicyclic nucleic acid (BNA)
  modified_base 13: mod_base = OTHER; note = bicyclic nucleic acid (BNA)
  modified_base 15: mod_base = OTHER; note = bicyclic nucleic acid (BNA)
  source 1..18: mol_type = other RNA
agtcggtaagttctgtcc

SEQ ID NO: 11570 - RNA, 18 nt, synthetic construct
  misc_feature 1..18: note = Description of Artificial Sequence: Synthetic Antisense oligonucleotide
  modified_base 1: mod_base = OTHER; note = bicyclic nucleic acid (BNA)
  modified_base 5..6: mod_base = OTHER; note = bicyclic nucleic acid (BNA)
  source 1..18: mol_type = other RNA
agtcggtaagttctgtcc

SEQ ID NO: 11571 - RNA, 18 nt, synthetic construct
  misc_feature 1..18: note = Description of Artificial Sequence: Synthetic Antisense oligonucleotide
  modified_base 1: mod_base = OTHER; note = bicyclic nucleic acid (BNA)
  modified_base 5: mod_base = OTHER; note = bicyclic nucleic acid (BNA)
  modified_base 15: mod_base = OTHER; note = bicyclic nucleic acid (BNA)
  source 1..18: mol_type = other RNA
agtcggtaagttctgtcc

SEQ ID NO: 11572 - RNA, 18 nt, synthetic construct
  misc_feature 1..18: note = Description of Artificial Sequence: Synthetic Antisense oligonucleotide
  modified_base 1: mod_base = OTHER; note = bicyclic nucleic acid (BNA)
  modified_base 5: mod_base = OTHER; note = bicyclic nucleic acid (BNA)
  modified_base 17: mod_base = OTHER; note = bicyclic nucleic acid (BNA)
  source 1..18: mol_type = other RNA
agtcggtaagttctgtcc

SEQ ID NO: 11573 - RNA, 18 nt, synthetic construct
  misc_feature 1..18: note = Description of Artificial Sequence: Synthetic Antisense oligonucleotide
  modified_base 1: mod_base = OTHER; note = bicyclic nucleic acid (BNA)
  modified_base 10: mod_base = OTHER; note = bicyclic nucleic acid (BNA)
  modified_base 17: mod_base = OTHER; note = bicyclic nucleic acid (BNA)
  source 1..18: mol_type = other RNA
agtcggtaagttctgtcc

SEQ ID NO: 11574 - RNA, 18 nt, synthetic construct
  misc_feature 1..18: note = Description of Artificial Sequence: Synthetic Antisense oligonucleotide
  modified_base 1: mod_base = OTHER; note = bicyclic nucleic acid (BNA)
  modified_base 4: mod_base = OTHER; note = bicyclic nucleic acid (BNA)
  modified_base 10: mod_base = OTHER; note = bicyclic nucleic acid (BNA)
  source 1..18: mol_type = other RNA
agtcggtaagttctgtcc

SEQ ID NO: 11575 - RNA, 18 nt, synthetic construct
  misc_feature 1..18: note = Description of Artificial Sequence: Synthetic Antisense oligonucleotide
  modified_base 1: mod_base = OTHER; note = bicyclic nucleic acid (BNA)
  modified_base 4: mod_base = OTHER; note = bicyclic nucleic acid (BNA)
  modified_base 6: mod_base = OTHER; note = bicyclic nucleic acid (BNA)
  source 1..18: mol_type = other RNA
agtcggtaagttctgtcc

SEQ ID NO: 11576 - RNA, 18 nt, synthetic construct
  misc_feature 1..18: note = Description of Artificial Sequence: Synthetic Antisense oligonucleotide
  modified_base 1: mod_base = OTHER; note = bicyclic nucleic acid (BNA)
  modified_base 4: mod_base = OTHER; note = bicyclic nucleic acid (BNA)
  modified_base 13: mod_base = OTHER; note = bicyclic nucleic acid (BNA)
  source 1..18: mol_type = other RNA
agtcggtaagttctgtcc

SEQ ID NO: 11577 - RNA, 18 nt, synthetic construct
  misc_feature 1..18: note = Description of Artificial Sequence: Synthetic Antisense oligonucleotide
  modified_base 1: mod_base = OTHER; note = bicyclic nucleic acid (BNA)
  modified_base 15: mod_base = OTHER; note = bicyclic nucleic acid (BNA)
  modified_base 17: mod_base = OTHER; note = bicyclic nucleic acid (BNA)
  source 1..18: mol_type = other RNA
agtcggtaagttctgtcc

SEQ ID NO: 11578 - RNA, 18 nt, synthetic construct
  misc_feature 1..18: note = Description of Artificial Sequence: Synthetic Antisense oligonucleotide
  modified_base 1: mod_base = OTHER; note = bicyclic nucleic acid (BNA)
  modified_base 6: mod_base = OTHER; note = bicyclic nucleic acid (BNA)
  modified_base 17: mod_base = OTHER; note = bicyclic nucleic acid (BNA)
  source 1..18: mol_type = other RNA
agtcggtaagttctgtcc

SEQ ID NO: 11579 - RNA, 18 nt, synthetic construct
  misc_feature 1..18: note = Description of Artificial Sequence: Synthetic Antisense oligonucleotide
  modified_base 1: mod_base = OTHER; note = bicyclic nucleic acid (BNA)
  modified_base 6: mod_base = OTHER; note = bicyclic nucleic acid (BNA)
  modified_base 15: mod_base = OTHER; note = bicyclic nucleic acid (BNA)
  source 1..18: mol_type = other RNA
agtcggtaagttctgtcc

SEQ ID NO: 11580 - RNA, 18 nt, synthetic construct
  misc_feature 1..18: note = Description of Artificial Sequence: Synthetic Antisense oligonucleotide
  modified_base 1: mod_base = OTHER; note = bicyclic nucleic acid (BNA)
  modified_base 4..5: mod_base = OTHER; note = bicyclic nucleic acid (BNA)
  source 1..18: mol_type = other RNA
agtcggtaagttctgtcc

SEQ ID NO: 11581 - RNA, 18 nt, synthetic construct
  misc_feature 1..18: note = Description of Artificial Sequence: Synthetic Antisense oligonucleotide
  modified_base 1: mod_base = OTHER; note = bicyclic nucleic acid (BNA)
  modified_base 10: mod_base = OTHER; note = bicyclic nucleic acid (BNA)
  modified_base 13: mod_base = OTHER; note = bicyclic nucleic acid (BNA)
  source 1..18: mol_type = other RNA
agtcggtaagttctgtcc

SEQ ID NO: 11582 - RNA, 18 nt, synthetic construct
  misc_feature 1..18: note = Description of Artificial Sequence: Synthetic Antisense oligonucleotide
  modified_base 1: mod_base = OTHER; note = bicyclic nucleic acid (BNA)
  modified_base 12: mod_base = OTHER; note = bicyclic nucleic acid (BNA)
  modified_base 17: mod_base = OTHER; note = bicyclic nucleic acid (BNA)
  source 1..18: mol_type = other RNA
ctgtccaagcccggttga

SEQ ID NO: 11583 - RNA, 18 nt, synthetic construct
  misc_feature 1..18: note = Description of Artificial Sequence: Synthetic Antisense oligonucleotide
  modified_base 1: mod_base = OTHER; note = bicyclic nucleic acid (BNA)
  modified_base 6: mod_base = OTHER; note = bicyclic nucleic acid (BNA)
  modified_base 10: mod_base = OTHER; note = bicyclic nucleic acid (BNA)
  source 1..18: mol_type = other RNA
ctgtccaagcccggttga

SEQ ID NO: 11584 - RNA, 18 nt, synthetic construct
  misc_feature 1..18: note = Description of Artificial Sequence: Synthetic Antisense oligonucleotide
  modified_base 1: mod_base = OTHER; note = bicyclic nucleic acid (BNA)
  modified_base 9: mod_base = OTHER; note = bicyclic nucleic acid (BNA)
  modified_base 14: mod_base = OTHER; note = bicyclic nucleic acid (BNA)
  source 1..18: mol_type = other RNA
ctgtccaagcccggttga

SEQ ID NO: 11585 - RNA, 18 nt, synthetic construct
  misc_feature 1..18: note = Description of Artificial Sequence: Synthetic Antisense oligonucleotide
  modified_base 1: mod_base = OTHER; note = bicyclic nucleic acid (BNA)
  modified_base 11..12: mod_base = OTHER; note = bicyclic nucleic acid (BNA)
  source 1..18: mol_type = other RNA
ctgtccaagcccggttga

SEQ ID NO: 11586 - RNA, 18 nt, synthetic construct
  misc_feature 1..18: note = Description of Artificial Sequence: Synthetic Antisense oligonucleotide
  modified_base 1: mod_base = OTHER; note = bicyclic nucleic acid (BNA)
  modified_base 5: mod_base = OTHER; note = bicyclic nucleic acid (BNA)
  modified_base 9: mod_base = OTHER; note = bicyclic nucleic acid (BNA)
  source 1..18: mol_type = other RNA
ctgtccaagcccggttga

SEQ ID NO: 11587 - RNA, 18 nt, synthetic construct
  misc_feature 1..18: note = Description of Artificial Sequence: Synthetic Antisense oligonucleotide
  modified_base 1: mod_base = OTHER; note = bicyclic nucleic acid (BNA)
  modified_base 3: mod_base = OTHER; note = bicyclic nucleic acid (BNA)
  modified_base 9: mod_base = OTHER; note = bicyclic nucleic acid (BNA)
  source 1..18: mol_type = other RNA
ctgtccaagcccggttga

SEQ ID NO: 11588 - RNA, 18 nt, synthetic construct
  misc_feature 1..18: note = Description of Artificial Sequence: Synthetic Antisense oligonucleotide
  modified_base 1: mod_base = OTHER; note = bicyclic nucleic acid (BNA)
  modified_base 6: mod_base = OTHER; note = bicyclic nucleic acid (BNA)
  modified_base 14: mod_base = OTHER; note = bicyclic nucleic acid (BNA)
  source 1..18: mol_type = other RNA
ctgtccaagcccggttga

SEQ ID NO: 11589 - RNA, 18 nt, synthetic construct
  misc_feature 1..18: note = Description of Artificial Sequence: Synthetic Antisense oligonucleotide
  modified_base 1: mod_base = OTHER; note = bicyclic nucleic acid (BNA)
  modified_base 9..10: mod_base = OTHER; note = bicyclic nucleic acid (BNA)
  source 1..18: mol_type = other RNA
ctgtccaagcccggttga

SEQ ID NO: 11590 - RNA, 18 nt, synthetic construct
  misc_feature 1..18: note = Description of Artificial Sequence: Synthetic Antisense oligonucleotide
  modified_base 1: mod_base = OTHER; note = bicyclic nucleic acid (BNA)
  modified_base 5: mod_base = OTHER; note = bicyclic nucleic acid (BNA)
  modified_base 13: mod_base = OTHER; note = bicyclic nucleic acid (BNA)
  source 1..18: mol_type = other RNA
ctgtccaagcccggttga

SEQ ID NO: 11591 - RNA, 18 nt, synthetic construct
  misc_feature 1..18: note = Description of Artificial Sequence: Synthetic Antisense oligonucleotide
  modified_base 1: mod_base = OTHER; note = bicyclic nucleic acid (BNA)
  modified_base 3: mod_base = OTHER; note = bicyclic nucleic acid (BNA)
  modified_base 13: mod_base = OTHER; note = bicyclic nucleic acid (BNA)
  source 1..18: mol_type = other RNA
ctgtccaagcccggttga

SEQ ID NO: 11592 - RNA, 18 nt, synthetic construct
  misc_feature 1..18: note = Description of Artificial Sequence: Synthetic Antisense oligonucleotide
  modified_base 1: mod_base = OTHER; note = bicyclic nucleic acid (BNA)
  modified_base 13: mod_base = OTHER; note = bicyclic nucleic acid (BNA)
  modified_base 17: mod_base = OTHER; note = bicyclic nucleic acid (BNA)
  source 1..18: mol_type = other RNA
ctgtccaagcccggttga

SEQ ID NO: 11593 - RNA, 18 nt, synthetic construct
  misc_feature 1..18: note = Description of Artificial Sequence: Synthetic Antisense oligonucleotide
  modified_base 1: mod_base = OTHER; note = bicyclic nucleic acid (BNA)
  modified_base 3: mod_base = OTHER; note = bicyclic nucleic acid (BNA)
  modified_base 6: mod_base = OTHER; note = bicyclic nucleic acid (BNA)
  source 1..18: mol_type = other RNA
ctgtccaagcccggttga

SEQ ID NO: 11594 - RNA, 18 nt, synthetic construct
  misc_feature 1..18: note = Description of Artificial Sequence: Synthetic Antisense oligonucleotide
  modified_base 1: mod_base = OTHER; note = bicyclic nucleic acid (BNA)
  modified_base 6: mod_base = OTHER; note = bicyclic nucleic acid (BNA)
  modified_base 9: mod_base = OTHER; note = bicyclic nucleic acid (BNA)
  source 1..18: mol_type = other RNA
ctgtccaagcccggttga

SEQ ID NO: 11595 - RNA, 18 nt, synthetic construct
  misc_feature 1..18: note = Description of Artificial Sequence: Synthetic Antisense oligonucleotide
  modified_base 1: mod_base = OTHER; note = bicyclic nucleic acid (BNA)
  modified_base 5: mod_base = OTHER; note = bicyclic nucleic acid (BNA)
  modified_base 10: mod_base = OTHER; note = bicyclic nucleic acid (BNA)
  source 1..18: mol_type = other RNA
ctgtccaagcccggttga

SEQ ID NO: 11596 - RNA, 18 nt, synthetic construct
  misc_feature 1..18: note = Description of Artificial Sequence: Synthetic Antisense oligonucleotide
  modified_base 1: mod_base = OTHER; note = bicyclic nucleic acid (BNA)
  modified_base 3: mod_base = OTHER; note = bicyclic nucleic acid (BNA)
  modified_base 10: mod_base = OTHER; note = bicyclic nucleic acid (BNA)
  source 1..18: mol_type = other RNA
ctgtccaagcccggttga

SEQ ID NO: 11597 - RNA, 18 nt, synthetic construct
  misc_feature 1..18: note = Description of Artificial Sequence: Synthetic Antisense oligonucleotide
  modified_base 1: mod_base = OTHER; note = bicyclic nucleic acid (BNA)
  modified_base 13..14: mod_base = OTHER; note = bicyclic nucleic acid (BNA)
  source 1..18: mol_type = other RNA
ctgtccaagcccggttga

SEQ ID NO: 11598 - RNA, 18 nt, synthetic construct
  misc_feature 1..18: note = Description of Artificial Sequence: Synthetic Antisense oligonucleotide
  modified_base 1: mod_base = OTHER; note = bicyclic nucleic acid (BNA)
  modified_base 6: mod_base = OTHER; note = bicyclic nucleic acid (BNA)
  modified_base 13: mod_base = OTHER; note = bicyclic nucleic acid (BNA)
  source 1..18: mol_type = other RNA
ctgtccaagcccggttga

SEQ ID NO: 11599 - RNA, 18 nt, synthetic construct
  misc_feature 1..18: note = Description of Artificial Sequence: Synthetic Antisense oligonucleotide
  modified_base 1: mod_base = OTHER; note = bicyclic nucleic acid (BNA)
  modified_base 9: mod_base = OTHER; note = bicyclic nucleic acid (BNA)
  modified_base 11: mod_base = OTHER; note = bicyclic nucleic acid (BNA)
  source 1..18: mol_type = other RNA
ctgtccaagcccggttga

SEQ ID NO: 11600 - RNA, 18 nt, synthetic construct
  misc_feature 1..18: note = Description of Artificial Sequence: Synthetic Antisense oligonucleotide
  modified_base 1: mod_base = OTHER; note = bicyclic nucleic acid (BNA)
  modified_base 14: mod_base = OTHER; note = bicyclic nucleic acid (BNA)
  modified_base 17: mod_base = OTHER; note = bicyclic nucleic acid (BNA)
  source 1..18: mol_type = other RNA
ctgtccaagcccggttga

SEQ ID NO: 11601 - RNA, 18 nt, synthetic construct
  misc_feature 1..18: note = Description of Artificial Sequence: Synthetic Antisense oligonucleotide
  modified_base 1: mod_base = OTHER; note = bicyclic nucleic acid (BNA)
  modified_base 11: mod_base = OTHER; note = bicyclic nucleic acid (BNA)
  modified_base 13: mod_base = OTHER; note = bicyclic nucleic acid (BNA)
  source 1..18: mol_type = other RNA
ctgtccaagcccggttga

SEQ ID NO: 11602 - RNA, 18 nt, synthetic construct
  misc_feature 1..18: note = Description of Artificial Sequence: Synthetic Antisense oligonucleotide
  modified_base 1: mod_base = OTHER; note = bicyclic nucleic acid (BNA)
  modified_base 5: mod_base = OTHER; note = bicyclic nucleic acid (BNA)
  modified_base 14: mod_base = OTHER; note = bicyclic nucleic acid (BNA)
  source 1..18: mol_type = other RNA
ctgtccaagcccggttga

SEQ ID NO: 11603 - RNA, 18 nt, synthetic construct
  misc_feature 1..18: note = Description of Artificial Sequence: Synthetic Antisense oligonucleotide
  modified_base 1: mod_base = OTHER; note = bicyclic nucleic acid (BNA)
  modified_base 3: mod_base = OTHER; note = bicyclic nucleic acid (BNA)
  modified_base 14: mod_base = OTHER; note = bicyclic nucleic acid (BNA)
  source 1..18: mol_type = other RNA
ctgtccaagcccggttga

SEQ ID NO: 11604 - RNA, 18 nt, synthetic construct
  misc_feature 1..18: note = Description of Artificial Sequence: Synthetic Antisense oligonucleotide
  modified_base 1: mod_base = OTHER; note = bicyclic nucleic acid (BNA)
  modified_base 10: mod_base = OTHER; note = bicyclic nucleic acid (BNA)
  modified_base 12: mod_base = OTHER; note = bicyclic nucleic acid (BNA)
  source 1..18: mol_type = other RNA
ctgtccaagcccggttga

SEQ ID NO: 11605 - RNA, 18 nt, synthetic construct
  misc_feature 1..18: note = Description of Artificial Sequence: Synthetic Antisense oligonucleotide
  modified_base 1: mod_base = OTHER; note = bicyclic nucleic acid (BNA)
  modified_base 9: mod_base = OTHER; note = bicyclic nucleic acid (BNA)
  modified_base 17: mod_base = OTHER; note = bicyclic nucleic acid (BNA)
  source 1..18: mol_type = other RNA
ctgtccaagcccggttga

SEQ ID NO: 11606 - RNA, 18 nt, synthetic construct
  misc_feature 1..18: note = Description of Artificial Sequence: Synthetic Antisense oligonucleotide
  modified_base 1: mod_base = OTHER; note = bicyclic nucleic acid (BNA)
  modified_base 12: mod_base = OTHER; note = bicyclic nucleic acid (BNA)
  modified_base 14: mod_base = OTHER; note = bicyclic nucleic acid (BNA)
  source 1..18: mol_type = other RNA
ctgtccaagcccggttga

SEQ ID NO: 11607 - RNA, 18 nt, synthetic construct
  misc_feature 1..18: note = Description of Artificial Sequence: Synthetic Antisense oligonucleotide
  modified_base 1: mod_base = OTHER; note = bicyclic nucleic acid (BNA)
  modified_base 5: mod_base = OTHER; note = bicyclic nucleic acid (BNA)
  modified_base 11: mod_base = OTHER; note = bicyclic nucleic acid (BNA)
  source 1..18: mol_type = other RNA
ctgtccaagcccggttga

SEQ ID NO: 11608 - RNA, 18 nt, synthetic construct
  misc_feature 1..18: note = Description of Artificial Sequence: Synthetic Antisense oligonucleotide
  modified_base 1: mod_base = OTHER; note = bicyclic nucleic acid (BNA)
  modified_base 3: mod_base = OTHER; note = bicyclic nucleic acid (BNA)
  modified_base 17: mod_base = OTHER; note = bicyclic nucleic acid (BNA)
  source 1..18: mol_type = other RNA
ctgtccaagcccggttga

SEQ ID NO: 11609 - RNA, 18 nt, synthetic construct
  misc_feature 1..18: note = Description of Artificial Sequence: Synthetic Antisense oligonucleotide
  modified_base 1: mod_base = OTHER; note = bicyclic nucleic acid (BNA)
  modified_base 6: mod_base = OTHER; note = bicyclic nucleic acid (BNA)
  modified_base 12: mod_base = OTHER; note = bicyclic nucleic acid (BNA)
  source 1..18: mol_type = other RNA
ctgtccaagcccggttga

SEQ ID NO: 11610 - RNA, 18 nt, synthetic construct
  misc_feature 1..18: note = Description of Artificial Sequence: Synthetic Antisense oligonucleotide
  modified_base 1: mod_base = OTHER; note = bicyclic nucleic acid (BNA)
  modified_base 5..6: mod_base = OTHER; note = bicyclic nucleic acid (BNA)
  source 1..18: mol_type = other RNA
ctgtccaagcccggttga

SEQ ID NO: 11611 - RNA, 18 nt, synthetic construct
  misc_feature 1..18: note = Description of Artificial Sequence: Synthetic Antisense oligonucleotide
  modified_base 1: mod_base = OTHER; note = bicyclic nucleic acid (BNA)
  modified_base 11: mod_base = OTHER; note = bicyclic nucleic acid (BNA)
  modified_base 14: mod_base = OTHER; note = bicyclic nucleic acid (BNA)
  source 1..18: mol_type = other RNA
ctgtccaagcccggttga

SEQ ID NO: 11612 - RNA, 18 nt, synthetic construct
  misc_feature 1..18: note = Description of Artificial Sequence: Synthetic Antisense oligonucleotide
  modified_base 1: mod_base = OTHER; note = bicyclic nucleic acid (BNA)
  modified_base 9: mod_base = OTHER; note = bicyclic nucleic acid (BNA)
  modified_base 12: mod_base = OTHER; note = bicyclic nucleic acid (BNA)
  source 1..18: mol_type = other RNA
ctgtccaagcccggttga

SEQ ID NO: 11613 - RNA, 18 nt, synthetic construct
  misc_feature 1..18: note = Description of Artificial Sequence: Synthetic Antisense oligonucleotide
  modified_base 1: mod_base = OTHER; note = bicyclic nucleic acid (BNA)
  modified_base 5: mod_base = OTHER; note = bicyclic nucleic acid (BNA)
  modified_base 17: mod_base = OTHER; note = bicyclic nucleic acid (BNA)
  source 1..18: mol_type = other RNA
ctgtccaagcccggttga

SEQ ID NO: 11614 - RNA, 18 nt, synthetic construct
  misc_feature 1..18: note = Description of Artificial Sequence: Synthetic Antisense oligonucleotide
  modified_base 1: mod_base = OTHER; note = bicyclic nucleic acid (BNA)
  modified_base 3: mod_base = OTHER; note = bicyclic nucleic acid (BNA)
  modified_base 11: mod_base = OTHER; note = bicyclic nucleic acid (BNA)
  source 1..18: mol_type = other RNA
ctgtccaagcccggttga

SEQ ID NO: 11615 - RNA, 18 nt, synthetic construct
  misc_feature 1..18: note = Description of Artificial Sequence: Synthetic Antisense oligonucleotide
  modified_base 1: mod_base = OTHER; note = bicyclic nucleic acid (BNA)
  modified_base 10..11: mod_base = OTHER; note = bicyclic nucleic acid (BNA)
  source 1..18: mol_type = other RNA
ctgtccaagcccggttga

SEQ ID NO: 11616 - RNA, 18 nt, synthetic construct
  misc_feature 1..18: note = Description of Artificial Sequence: Synthetic Antisense oligonucleotide
  modified_base 1: mod_base = OTHER; note = bicyclic nucleic acid (BNA)
  modified_base 10: mod_base = OTHER; note = bicyclic nucleic acid (BNA)
  modified_base 17: mod_base = OTHER; note = bicyclic nucleic acid (BNA)
  source 1..18: mol_type = other RNA
ctgtccaagcccggttga

SEQ ID NO: 11617 - RNA, 18 nt, synthetic construct
  misc_feature 1..18: note = Description of Artificial Sequence: Synthetic Antisense oligonucleotide
  modified_base 1: mod_base = OTHER; note = bicyclic nucleic acid (BNA)
  modified_base 12..13: mod_base = OTHER; note = bicyclic nucleic acid (BNA)
  source 1..18: mol_type = other RNA
ctgtccaagcccggttga

SEQ ID NO: 11618 - RNA, 18 nt, synthetic construct
  misc_feature 1..18: note = Description of Artificial Sequence: Synthetic Antisense oligonucleotide
  modified_base 1: mod_base = OTHER; note = bicyclic nucleic acid (BNA)
  modified_base 5: mod_base = OTHER; note = bicyclic nucleic acid (BNA)
  modified_base 12: mod_base = OTHER; note = bicyclic nucleic acid (BNA)
  source 1..18: mol_type = other RNA
ctgtccaagcccggttga

SEQ ID NO: 11619 - RNA, 18 nt, synthetic construct
  misc_feature 1..18: note = Description of Artificial Sequence: Synthetic Antisense oligonucleotide
  modified_base 1: mod_base = OTHER; note = bicyclic nucleic acid (BNA)
  modified_base 10: mod_base = OTHER; note = bicyclic nucleic acid (BNA)
  modified_base 14: mod_base = OTHER; note = bicyclic nucleic acid (BNA)
  source 1..18: mol_type = other RNA
ctgtccaagcccggttga

SEQ ID NO: 11620 - RNA, 18 nt, synthetic construct
  misc_feature 1..18: note = Description of Artificial Sequence: Synthetic Antisense oligonucleotide
  modified_base 1: mod_base = OTHER; note = bicyclic nucleic acid (BNA)
  modified_base 6: mod_base = OTHER; note = bicyclic nucleic acid (BNA)
  modified_base 11: mod_base = OTHER; note = bicyclic nucleic acid (BNA)
  source 1..18: mol_type = other RNA
ctgtccaagcccggttga

SEQ ID NO: 11621 - RNA, 18 nt, synthetic construct
  misc_feature 1..18: note = Description of Artificial Sequence: Synthetic Antisense oligonucleotide
  modified_base 1: mod_base = OTHER; note = bicyclic nucleic acid (BNA)
  modified_base 6: mod_base = OTHER; note = bicyclic nucleic acid (BNA)
  modified_base 17: mod_base = OTHER; note = bicyclic nucleic acid (BNA)
  source 1..18: mol_type = other RNA
ctgtccaagcccggttga

SEQ ID NO: 11622 - RNA, 18 nt, synthetic construct
  misc_feature 1..18: note = Description of Artificial Sequence: Synthetic Antisense oligonucleotide
  modified_base 1: mod_base = OTHER; note = bicyclic nucleic acid (BNA)
  modified_base 9: mod_base = OTHER; note = bicyclic nucleic acid (BNA)
  modified_base 13: mod_base = OTHER; note = bicyclic nucleic acid (BNA)
  source 1..18: mol_type = other RNA
ctgtccaagcccggttga

SEQ ID NO: 11623 - RNA, 18 nt, synthetic construct
  misc_feature 1..18: note = Description of Artificial Sequence: Synthetic Antisense oligonucleotide
  modified_base 1: mod_base = OTHER; note = bicyclic nucleic acid (BNA)
  modified_base 11: mod_base = OTHER; note = bicyclic nucleic acid (BNA)
  modified_base 17: mod_base = OTHER; note = bicyclic nucleic acid (BNA)
  source 1..18: mol_type = other RNA
ctgtccaagcccggttga

SEQ ID NO: 11624 - RNA, 18 nt, synthetic construct
  misc_feature 1..18: note = Description of Artificial Sequence: Synthetic Antisense oligonucleotide
  modified_base 1: mod_base = OTHER; note = bicyclic nucleic acid (BNA)
  modified_base 3: mod_base = OTHER; note = bicyclic nucleic acid (BNA)
  modified_base 12: mod_base = OTHER; note = bicyclic nucleic acid (BNA)
  source 1..18: mol_type = other RNA
ctgtccaagcccggttga

SEQ ID NO: 11625 - RNA, 18 nt, synthetic construct
  misc_feature 1..18: note = Description of Artificial Sequence: Synthetic Antisense oligonucleotide
  modified_base 1: mod_base = OTHER; note = bicyclic nucleic acid (BNA)
  modified_base 3: mod_base = OTHER; note = bicyclic nucleic acid (BNA)
  modified_base 5: mod_base = OTHER; note = bicyclic nucleic acid (BNA)
  source 1..18: mol_type = other RNA
ctgtccaagcccggttga

SEQ ID NO: 11626 - RNA, 18 nt, synthetic construct
  misc_feature 1..18: note = Description of Artificial Sequence: Synthetic Antisense oligonucleotide
  modified_base 1: mod_base = OTHER; note = bicyclic nucleic acid (BNA)
  modified_base 10: mod_base = OTHER; note = bicyclic nucleic acid (BNA)
  modified_base 13: mod_base = OTHER; note = bicyclic nucleic acid (BNA)
  source 1..18: mol_type = other RNA
ctgtccaagcccggttga

SEQ ID NO: 11627 - DNA, 20 bp, synthetic construct
  misc_feature 1..20: note = Description of Artificial Sequence: Synthetic Antisense oligonucleotide
  misc_feature 1..20: note = Original Sequence: tcaaggaagauggcauuucu
  modified_base 1: mod_base = OTHER; note = bicyclic nucleic acid (BNA)
  modified_base 9: mod_base = OTHER; note = bicyclic nucleic acid (BNA)
  source 1..20: mol_type = other DNA
  modified_base 11: mod_base = OTHER; note = Uracil
  modified_base 16: mod_base = OTHER; note = Uracil
  modified_base 17: mod_base = OTHER; note = Uracil
  modified_base 18: mod_base = OTHER; note = Uracil
  modified_base 20: mod_base = OTHER; note = Uracil
tcaaggaagatggcatttct

SEQ ID NO: 11628 - DNA, 20 bp, synthetic construct
  misc_feature 1..20: note = Description of Artificial Sequence: Synthetic Antisense oligonucleotide
  misc_feature 1..20: note = Original Sequence: tcaaggaagauggcauuucu
  modified_base 1: mod_base = OTHER; note = bicyclic nucleic acid (BNA)
  modified_base 5: mod_base = OTHER; note = bicyclic nucleic acid (BNA)
  source 1..20: mol_type = other DNA
  modified_base 11: mod_base = OTHER; note = Uracil
  modified_base 16: mod_base = OTHER; note = Uracil
  modified_base 17: mod_base = OTHER; note = Uracil
  modified_base 18: mod_base = OTHER; note = Uracil
  modified_base 20: mod_base = OTHER; note = Uracil
tcaaggaagatggcatttct

SEQ ID NO: 11629 - DNA, 20 bp, synthetic construct
  misc_feature 1..20: note = Description of Artificial Sequence: Synthetic Antisense oligonucleotide
  misc_feature 1..20: note = Original Sequence: tcaaggaagauggcauuucu
  modified_base 1: mod_base = OTHER; note = bicyclic nucleic acid (BNA)
  modified_base 6: mod_base = OTHER; note = bicyclic nucleic acid (BNA)
  source 1..20: mol_type = other DNA
  modified_base 11: mod_base = OTHER; note = Uracil
  modified_base 16: mod_base = OTHER; note = Uracil
  modified_base 17: mod_base = OTHER; note = Uracil
  modified_base 18: mod_base = OTHER; note = Uracil
  modified_base 20: mod_base = OTHER; note = Uracil
tcaaggaagatggcatttct

SEQ ID NO: 11630 - DNA, 20 bp, synthetic construct
  misc_feature 1..20: note = Description of Artificial Sequence: Synthetic Antisense oligonucleotide
  misc_feature 1..20: note = Original Sequence: tcaaggaagauggcauuucu
  modified_base 1: mod_base = OTHER; note = bicyclic nucleic acid (BNA)
  modified_base 12: mod_base = OTHER; note = bicyclic nucleic acid (BNA)
  source 1..20: mol_type = other DNA
  modified_base 11: mod_base = OTHER; note = Uracil
  modified_base 16: mod_base = OTHER; note = Uracil
  modified_base 17: mod_base = OTHER; note = Uracil
  modified_base 18: mod_base = OTHER; note = Uracil
  modified_base 20: mod_base = OTHER; note = Uracil
tcaaggaagatggcatttct

SEQ ID NO: 11631 - DNA, 20 bp, synthetic construct
  misc_feature 1..20: note = Description of Artificial Sequence: Synthetic Antisense oligonucleotide
  misc_feature 1..20: note = Original Sequence: tcaaggaagauggcauuucu
  modified_base 1: mod_base = OTHER; note = bicyclic nucleic acid (BNA)
  modified_base 13: mod_base = OTHER; note = bicyclic nucleic acid (BNA)
  source 1..20: mol_type = other DNA
  modified_base 11: mod_base = OTHER; note = Uracil
  modified_base 16: mod_base = OTHER; note = Uracil
  modified_base 17: mod_base = OTHER; note = Uracil
  modified_base 18: mod_base = OTHER; note = Uracil
  modified_base 20: mod_base = OTHER; note = Uracil
tcaaggaagatggcatttct

SEQ ID NO: 11632 - DNA, 20 bp, synthetic construct
  misc_feature 1..20: note = Description of Artificial Sequence: Synthetic Antisense oligonucleotide
  misc_feature 1..20: note = Original Sequence: tcaaggaagauggcauuucu
  modified_base 1: mod_base = OTHER; note = bicyclic nucleic acid (BNA)
  modified_base 19: mod_base = OTHER; note = bicyclic nucleic acid (BNA)
  source 1..20: mol_type = other DNA
  modified_base 11: mod_base = OTHER; note = Uracil
  modified_base 16: mod_base = OTHER; note = Uracil
  modified_base 17: mod_base = OTHER; note = Uracil
  modified_base 18: mod_base = OTHER; note = Uracil
  modified_base 20: mod_base = OTHER; note = Uracil
tcaaggaagatggcatttct

SEQ ID NO: 11633 - DNA, 20 bp, synthetic construct
  misc_feature 1..20: note = Description of Artificial Sequence: Synthetic Antisense oligonucleotide
  misc_feature 1..20: note = Original Sequence: tcaaggaagauggcauuucu
  modified_base 1: mod_base = OTHER; note = bicyclic nucleic acid (BNA)
  modified_base 14: mod_base = OTHER; note = bicyclic nucleic acid (BNA)
  source 1..20: mol_type = other DNA
  modified_base 11: mod_base = OTHER; note = Uracil
  modified_base 16: mod_base = OTHER; note = Uracil
  modified_base 17: mod_base = OTHER; note = Uracil
  modified_base 18: mod_base = OTHER; note = Uracil
  modified_base 20: mod_base = OTHER; note = Uracil
tcaaggaagatggcatttct

SEQ ID NO: 11634 - DNA, 22 bp, synthetic construct
  misc_feature 1..22: note = Description of Artificial Sequence: Synthetic Antisense oligonucleotide
  misc_feature 1..22: note = Original Sequence: tcaaggaagauggcauuucuag
  modified_base 1: mod_base = OTHER; note = bicyclic nucleic acid (BNA)
  modified_base 9: mod_base = OTHER; note = bicyclic nucleic acid (BNA)
  source 1..22: mol_type = other DNA
  modified_base 11: mod_base = OTHER; note = Uracil
  modified_base 16: mod_base = OTHER; note = Uracil
  modified_base 17: mod_base = OTHER; note = Uracil
  modified_base 18: mod_base = OTHER; note = Uracil
  modified_base 20: mod_base = OTHER; note = Uracil
tcaaggaagatggcatttctag

SEQ ID NO: 11635 - DNA, 22 bp, synthetic construct
  misc_feature 1..22: note = Description of Artificial Sequence: Synthetic Antisense oligonucleotide
  misc_feature 1..22: note = Original Sequence: tcaaggaagauggcauuucuag
  modified_base 1: mod_base = OTHER; note = bicyclic nucleic acid (BNA)
  modified_base 5: mod_base = OTHER; note = bicyclic nucleic acid (BNA)
  source 1..22: mol_type = other DNA
  modified_base 11: mod_base = OTHER; note = Uracil
  modified_base 16: mod_base = OTHER; note = Uracil
  modified_base 17: mod_base = OTHER; note = Uracil
  modified_base 18: mod_base = OTHER; note = Uracil
  modified_base 20: mod_base = OTHER; note = Uracil
tcaaggaagatggcatttctag

SEQ ID NO: 11636 - DNA, 22 bp, synthetic construct
  misc_feature 1..22: note = Description of Artificial Sequence: Synthetic Antisense oligonucleotide
  misc_feature 1..22: note = Original Sequence: tcaaggaagauggcauuucuag
  modified_base 1: mod_base = OTHER; note = bicyclic nucleic acid (BNA)
  modified_base 6: mod_base = OTHER; note = bicyclic nucleic acid (BNA)
  source 1..22: mol_type = other DNA
  modified_base 11: mod_base = OTHER; note = Uracil
  modified_base 16: mod_base = OTHER; note = Uracil
  modified_base 17: mod_base = OTHER; note = Uracil
  modified_base 18: mod_base = OTHER; note = Uracil
  modified_base 20: mod_base = OTHER; note = Uracil
tcaaggaagatggcatttctag

SEQ ID NO: 11637 - DNA, 22 bp, synthetic construct
  misc_feature 1..22: note = Description of Artificial Sequence: Synthetic Antisense oligonucleotide
  misc_feature 1..22: note = Original Sequence: tcaaggaagauggcauuucuag
  modified_base 1: mod_base = OTHER; note = bicyclic nucleic acid (BNA)
  modified_base 12: mod_base = OTHER; note = bicyclic nucleic acid (BNA)
  source 1..22: mol_type = other DNA
  modified_base 11: mod_base = OTHER; note = Uracil
  modified_base 16: mod_base = OTHER; note = Uracil
  modified_base 17: mod_base = OTHER; note = Uracil
  modified_base 18: mod_base = OTHER; note = Uracil
  modified_base 20: mod_base = OTHER; note = Uracil
tcaaggaagatggcatttctag

SEQ ID NO: 11638 - DNA, 22 bp, synthetic construct
  misc_feature 1..22: note = Description of Artificial Sequence: Synthetic Antisense oligonucleotide
  misc_feature 1..22: note = Original Sequence: tcaaggaagauggcauuucuag
  modified_base 1: mod_base = OTHER; note = bicyclic nucleic acid (BNA)
  modified_base 13: mod_base = OTHER; note = bicyclic nucleic acid (BNA)
  source 1..22: mol_type = other DNA
  modified_base 11: mod_base = OTHER; note = Uracil
  modified_base 16: mod_base = OTHER; note = Uracil
  modified_base 17: mod_base = OTHER; note = Uracil
  modified_base 18: mod_base = OTHER; note = Uracil
  modified_base 20: mod_base = OTHER; note = Uracil
tcaaggaagatggcatttctag

SEQ ID NO: 11639 - DNA, 22 bp, synthetic construct
  misc_feature 1..22: note = Description of Artificial Sequence: Synthetic Antisense oligonucleotide
  misc_feature 1..22: note = Original Sequence: tcaaggaagauggcauuucuag
  modified_base 1: mod_base = OTHER; note = bicyclic nucleic acid (BNA)
  modified_base 19: mod_base = OTHER; note = bicyclic nucleic acid (BNA)
  source 1..22: mol_type = other DNA
  modified_base 11: mod_base = OTHER; note = Uracil
  modified_base 16: mod_base = OTHER; note = Uracil
  modified_base 17: mod_base = OTHER; note = Uracil
  modified_base 18: mod_base = OTHER; note = Uracil
  modified_base 20: mod_base = OTHER; note = Uracil
tcaaggaagatggcatttctag

SEQ ID NO: 11640 - DNA, 22 bp, synthetic construct
  misc_feature 1..22: note = Description of Artificial Sequence: Synthetic Antisense oligonucleotide
  misc_feature 1..22: note = Original Sequence: tcaaggaagauggcauuucuag
  modified_base 1: mod_base = OTHER; note = bicyclic nucleic acid (BNA)
  modified_base 14: mod_base = OTHER; note = bicyclic nucleic acid (BNA)
  source 1..22: mol_type = other DNA
  modified_base 11: mod_base = OTHER; note = Uracil
  modified_base 16: mod_base = OTHER; note = Uracil
  modified_base 17: mod_base = OTHER; note = Uracil
  modified_base 18: mod_base = OTHER; note = Uracil
  modified_base 20: mod_base = OTHER; note = Uracil
tcaaggaagatggcatttctag

SEQ ID NO: 11641 - DNA, 20 bp, synthetic construct
  misc_feature 1..20: note = Description of Artificial Sequence: Synthetic Antisense oligonucleotide
  misc_feature 1..20: note = Original Sequence: tcaaggaagauggcauuucu
  modified_base 1: mod_base = OTHER; note = bicyclic nucleic acid (BNA)
  modified_base 9: mod_base = OTHER; note = bicyclic nucleic acid (BNA)
  modified_base 14: mod_base = OTHER; note = bicyclic nucleic acid (BNA)
  source 1..20: mol_type = other DNA
  modified_base 11: mod_base = OTHER; note = Uracil
  modified_base 16: mod_base = OTHER; note = Uracil
  modified_base 17: mod_base = OTHER; note = Uracil
  modified_base 18: mod_base = OTHER; note = Uracil
  modified_base 20: mod_base = OTHER; note = Uracil
tcaaggaagatggcatttct

SEQ ID NO: 11642 - DNA, 20 bp, synthetic construct
  misc_feature 1..20: note = Description of Artificial Sequence: Synthetic Antisense oligonucleotide
  misc_feature 1..20: note = Original Sequence: tcaaggaagauggcauuucu
  modified_base 1: mod_base = OTHER; note = bicyclic nucleic acid (BNA)
  modified_base 5: mod_base = OTHER; note = bicyclic nucleic acid (BNA)
  modified_base 9: mod_base = OTHER; note = bicyclic nucleic acid (BNA)
  source 1..20: mol_type = other DNA
  modified_base 11: mod_base = OTHER; note = Uracil
  modified_base 16: mod_base = OTHER; note = Uracil
  modified_base 17: mod_base = OTHER; note = Uracil
  modified_base 18: mod_base = OTHER; note = Uracil
  modified_base 20: mod_base = OTHER; note = Uracil
tcaaggaagatggcatttct

SEQ ID NO: 11643 - DNA, 20 bp, synthetic construct
  misc_feature 1..20: note = Description of Artificial Sequence: Synthetic Antisense oligonucleotide
  misc_feature 1..20: note = Original Sequence: tcaaggaagauggcauuucu
  modified_base 1: mod_base = OTHER; note = bicyclic nucleic acid (BNA)
  modified_base 5: mod_base = OTHER; note = bicyclic nucleic acid (BNA)
  modified_base 19: mod_base = OTHER; note = bicyclic nucleic acid (BNA)
  source 1..20: mol_type = other DNA
  modified_base 11: mod_base = OTHER; note = Uracil
  modified_base 16: mod_base = OTHER; note = Uracil
  modified_base 17: mod_base = OTHER; note = Uracil
  modified_base 18: mod_base = OTHER; note = Uracil
  modified_base 20: mod_base = OTHER; note = Uracil
tcaaggaagatggcatttct

SEQ ID NO: 11644 - DNA, 20 bp, synthetic construct
  misc_feature 1..20: note = Description of Artificial Sequence: Synthetic Antisense oligonucleotide
  misc_feature 1..20: note = Original Sequence: tcaaggaagauggcauuucu
  modified_base 1: mod_base = OTHER; note = bicyclic nucleic acid (BNA)
  modified_base 6: mod_base = OTHER; note = bicyclic nucleic acid (BNA)
  modified_base 14: mod_base = OTHER; note = bicyclic nucleic acid (BNA)
  source 1..20: mol_type = other DNA
  modified_base 11: mod_base = OTHER; note = Uracil
  modified_base 16: mod_base = OTHER; note = Uracil
  modified_base 17: mod_base = OTHER; note = Uracil
  modified_base 18: mod_base = OTHER; note = Uracil
  modified_base 20: mod_base = OTHER; note = Uracil
tcaaggaagatggcatttct

SEQ ID NO: 11645 - DNA, 20 bp, synthetic construct
  misc_feature 1..20: note = Description of Artificial Sequence: Synthetic Antisense oligonucleotide
  misc_feature 1..20: note = Original Sequence: tcaaggaagauggcauuucu
  modified_base 1: mod_base = OTHER; note = bicyclic nucleic acid (BNA)
  modified_base 5: mod_base = OTHER; note = bicyclic nucleic acid (BNA)
  modified_base 13: mod_base = OTHER; note = bicyclic nucleic acid (BNA)
  source 1..20: mol_type = other DNA
  modified_base 11: mod_base = OTHER; note = Uracil
  modified_base 16: mod_base = OTHER; note = Uracil
  modified_base 17: mod_base = OTHER; note = Uracil
  modified_base 18: mod_base = OTHER; note = Uracil
  modified_base 20: mod_base = OTHER; note = Uracil
tcaaggaagatggcatttct

SEQ ID NO: 11646 - DNA, 20 bp, synthetic construct
  misc_feature 1..20: note = Description of Artificial Sequence: Synthetic Antisense oligonucleotide
  misc_feature 1..20: note = Original Sequence: tcaaggaagauggcauuucu
  modified_base 1: mod_base = OTHER; note = bicyclic nucleic acid (BNA)
  modified_base 6: mod_base = OTHER; note = bicyclic nucleic acid (BNA)
  modified_base 9: mod_base = OTHER; note = bicyclic nucleic acid (BNA)
  source 1..20: mol_type = other DNA
  modified_base 11: mod_base = OTHER; note = Uracil
  modified_base 16: mod_base = OTHER; note = Uracil
  modified_base 17: mod_base = OTHER; note = Uracil
  modified_base 18: mod_base = OTHER; note = Uracil
  modified_base 20: mod_base = OTHER; note = Uracil
tcaaggaagatggcatttct

SEQ ID NO: 11647 - DNA, 20 bp, synthetic construct
  misc_feature 1..20: note = Description of Artificial Sequence: Synthetic Antisense oligonucleotide
  misc_feature 1..20: note = Original Sequence: tcaaggaagauggcauuucu
  modified_base 1: mod_base = OTHER; note = bicyclic nucleic acid (BNA)
  modified_base 13..14: mod_base = OTHER; note = bicyclic nucleic acid (BNA)
  source 1..20: mol_type = other DNA
  modified_base 11: mod_base = OTHER; note = Uracil
  modified_base 16: mod_base = OTHER; note = Uracil
  modified_base 17: mod_base = OTHER; note = Uracil
  modified_base 18: mod_base = OTHER; note = Uracil
  modified_base 20: mod_base = OTHER; note = Uracil
tcaaggaagatggcatttct

SEQ ID NO: 11648 - DNA, 20 bp, synthetic construct
  misc_feature 1..20: note = Description of Artificial Sequence: Synthetic Antisense oligonucleotide
  misc_feature 1..20: note = Original Sequence: tcaaggaagauggcauuucu
  modified_base 1: mod_base = OTHER; note = bicyclic nucleic acid (BNA)
  modified_base 6: mod_base = OTHER; note = bicyclic nucleic acid (BNA)
  modified_base 13: mod_base = OTHER; note = bicyclic nucleic acid (BNA)
  source 1..20: mol_type = other DNA
  modified_base 11: mod_base = OTHER; note = Uracil
  modified_base 16: mod_base = OTHER; note = Uracil
  modified_base 17: mod_base = OTHER; note = Uracil
  modified_base 18: mod_base = OTHER; note = Uracil
  modified_base 20: mod_base = OTHER; note = Uracil
tcaaggaagatggcatttct

SEQ ID NO: 11649 - DNA, 20 bp, synthetic construct
  misc_feature 1..20: note = Description of Artificial Sequence: Synthetic Antisense oligonucleotide
  misc_feature 1..20: note = Original Sequence: tcaaggaagauggcauuucu
  modified_base 1: mod_base = OTHER; note = bicyclic nucleic acid (BNA)
  modified_base 6: mod_base = OTHER; note = bicyclic nucleic acid (BNA)
  modified_base 19: mod_base = OTHER; note = bicyclic nucleic acid (BNA)
  source 1..20: mol_type = other DNA
  modified_base 11: mod_base = OTHER; note = Uracil
  modified_base 16: mod_base = OTHER; note = Uracil
  modified_base 17: mod_base = OTHER; note = Uracil
  modified_base 18: mod_base = OTHER; note = Uracil
  modified_base 20: mod_base = OTHER; note = Uracil
tcaaggaagatggcatttct

SEQ ID NO: 11650 - DNA, 20 bp, synthetic construct
  misc_feature 1..20: note = Description of Artificial Sequence: Synthetic Antisense oligonucleotide
  misc_feature 1..20: note = Original Sequence: tcaaggaagauggcauuucu
  modified_base 1: mod_base = OTHER; note = bicyclic nucleic acid (BNA)
  modified_base 5: mod_base = OTHER; note = bicyclic nucleic acid (BNA)
  modified_base 14: mod_base = OTHER; note = bicyclic nucleic acid (BNA)
  source 1..20: mol_type = other DNA
  modified_base 11: mod_base = OTHER; note = Uracil
  modified_base 16: mod_base = OTHER; note = Uracil
  modified_base 17: mod_base = OTHER; note = Uracil
  modified_base 18: mod_base = OTHER; note = Uracil
  modified_base 20: mod_base = OTHER; note = Uracil
tcaaggaagatggcatttct

SEQ ID NO: 11651 - DNA, 20 bp, synthetic construct
  misc_feature 1..20: note = Description of Artificial Sequence: Synthetic Antisense oligonucleotide
  misc_feature 1..20: note = Original Sequence: tcaaggaagauggcauuucu
  modified_base 1: mod_base = OTHER; note = bicyclic nucleic acid (BNA)
  modified_base 12: mod_base = OTHER; note = bicyclic nucleic acid (BNA)
  modified_base 19: mod_base = OTHER; note = bicyclic nucleic acid (BNA)
  source 1..20: mol_type = other DNA
  modified_base 11: mod_base = OTHER; note = Uracil
  modified_base 16: mod_base = OTHER; note = Uracil
  modified_base 17: mod_base = OTHER; note = Uracil
  modified_base 18: mod_base = OTHER; note = Uracil
  modified_base 20: mod_base = OTHER; note = Uracil
tcaaggaagatggcatttct

SEQ ID NO: 11652 - DNA, 20 bp, synthetic construct
  misc_feature 1..20: note = Description of Artificial Sequence: Synthetic Antisense oligonucleotide
  misc_feature 1..20: note = Original Sequence: tcaaggaagauggcauuucu
  modified_base 1: mod_base = OTHER; note = bicyclic nucleic acid (BNA)
  modified_base 12: mod_base = OTHER; note = bicyclic nucleic acid (BNA)
  modified_base 14: mod_base = OTHER; note = bicyclic nucleic acid (BNA)
  source 1..20: mol_type = other DNA
  modified_base 11: mod_base = OTHER; note = Uracil
  modified_base 16: mod_base = OTHER; note = Uracil
  modified_base 17: mod_base = OTHER; note = Uracil
  modified_base 18: mod_base = OTHER; note = Uracil
  modified_base 20: mod_base = OTHER; note = Uracil
tcaaggaagatggcatttct

SEQ ID NO: 11653 - DNA, 20 bp, synthetic construct
  misc_feature 1..20: note = Description of Artificial Sequence: Synthetic Antisense oligonucleotide
  misc_feature 1..20: note = Original Sequence: tcaaggaagauggcauuucu
  modified_base 1: mod_base = OTHER; note = bicyclic nucleic acid (BNA)
  modified_base 6: mod_base = OTHER; note = bicyclic nucleic acid (BNA)
  modified_base 12: mod_base = OTHER; note = bicyclic nucleic acid (BNA)
  source 1..20: mol_type = other DNA
  modified_base 11: mod_base = OTHER; note = Uracil
  modified_base 16: mod_base = OTHER; note = Uracil
  modified_base 17: mod_base = OTHER; note = Uracil
  modified_base 18: mod_base = OTHER; note = Uracil
  modified_base 20: mod_base = OTHER; note = Uracil
tcaaggaagatggcatttct

SEQ ID NO: 11654 - DNA, 20 bp, synthetic construct
  misc_feature 1..20: note = Description of Artificial Sequence: Synthetic Antisense oligonucleotide
  misc_feature 1..20: note = Original Sequence: tcaaggaagauggcauuucu
  modified_base 1: mod_base = OTHER; note = bicyclic nucleic acid (BNA)
  modified_base 5..6: mod_base = OTHER; note = bicyclic nucleic acid (BNA)
  source 1..20: mol_type = other DNA
  modified_base 11: mod_base = OTHER; note = Uracil
  modified_base 16: mod_base = OTHER; note = Uracil
  modified_base 17: mod_base = OTHER; note = Uracil
  modified_base 18: mod_base = OTHER; note = Uracil
  modified_base 20: mod_base = OTHER; note = Uracil
tcaaggaagatggcatttct

SEQ ID NO: 11655 - DNA, 20 bp, synthetic construct
  misc_feature 1..20: note = Description of Artificial Sequence: Synthetic Antisense oligonucleotide
  misc_feature 1..20: note = Original Sequence: tcaaggaagauggcauuucu
  modified_base 1: mod_base = OTHER; note = bicyclic nucleic acid (BNA)
  modified_base 9: mod_base = OTHER; note = bicyclic nucleic acid (BNA)
  modified_base 12: mod_base = OTHER; note = bicyclic nucleic acid (BNA)
  source 1..20: mol_type = other DNA
  modified_base 11: mod_base = OTHER; note = Uracil
  modified_base 16: mod_base = OTHER; note = Uracil
  modified_base 17: mod_base = OTHER; note = Uracil
  modified_base 18: mod_base = OTHER; note = Uracil
  modified_base 20: mod_base = OTHER; note = Uracil
tcaaggaagatggcatttct

SEQ ID NO: 11656 - DNA, 20 bp, synthetic construct
  misc_feature 1..20: note = Description of Artificial Sequence: Synthetic Antisense oligonucleotide
  misc_feature 1..20: note = Original Sequence: tcaaggaagauggcauuucu
  modified_base 1: mod_base = OTHER; note = bicyclic nucleic acid (BNA)
  modified_base 13: mod_base = OTHER; note = bicyclic nucleic acid (BNA)
  modified_base 19: mod_base = OTHER; note = bicyclic nucleic acid (BNA)
  source 1..20: mol_type = other DNA
  modified_base 11: mod_base = OTHER; note = Uracil
  modified_base 16: mod_base = OTHER; note = Uracil
  modified_base 17: mod_base = OTHER; note = Uracil
  modified_base 18: mod_base = OTHER; note = Uracil
  modified_base 20: mod_base = OTHER; note = Uracil
tcaaggaagatggcatttct

SEQ ID NO: 11657 - DNA, 20 bp, synthetic construct
  misc_feature 1..20: note = Description of Artificial Sequence: Synthetic Antisense oligonucleotide
  misc_feature 1..20: note = Original Sequence: tcaaggaagauggcauuucu
  modified_base 1: mod_base = OTHER; note = bicyclic nucleic acid (BNA)
  modified_base 12..13: mod_base = OTHER; note = bicyclic nucleic acid (BNA)
  source 1..20: mol_type = other DNA
  modified_base 11: mod_base = OTHER; note = Uracil
  modified_base 16: mod_base = OTHER; note = Uracil
  modified_base 17: mod_base = OTHER; note = Uracil
  modified_base 18: mod_base = OTHER; note = Uracil
  modified_base 20: mod_base = OTHER; note = Uracil
tcaaggaagatggcatttct

SEQ ID NO: 11658 - DNA, 20 bp, synthetic construct
  misc_feature 1..20: note = Description of Artificial Sequence: Synthetic Antisense oligonucleotide
  misc_feature 1..20: note = Original Sequence: tcaaggaagauggcauuucu
  modified_base 1: mod_base = OTHER; note = bicyclic nucleic acid (BNA)
  modified_base 5: mod_base = OTHER; note = bicyclic nucleic acid (BNA)
  modified_base 12: mod_base = OTHER; note = bicyclic nucleic acid (BNA)
  source 1..20: mol_type = other DNA
  modified_base 11: mod_base = OTHER; note = Uracil
  modified_base 16: mod_base = OTHER; note = Uracil
  modified_base 17: mod_base = OTHER; note = Uracil
  modified_base 18: mod_base = OTHER; note = Uracil
  modified_base 20: mod_base = OTHER; note = Uracil
tcaaggaagatggcatttct

SEQ ID NO: 11659 - DNA, 20 bp, synthetic construct
  misc_feature 1..20: note = Description of Artificial Sequence: Synthetic Antisense oligonucleotide
  misc_feature 1..20: note = Original Sequence: tcaaggaagauggcauuucu
  modified_base 1: mod_base = OTHER; note = bicyclic nucleic acid (BNA)
  modified_base 9: mod_base = OTHER; note = bicyclic nucleic acid (BNA)
  modified_base 13: mod_base = OTHER; note = bicyclic nucleic acid (BNA)
  source 1..20: mol_type = other DNA
  modified_base 11: mod_base = OTHER; note = Uracil
  modified_base 16: mod_base = OTHER; note = Uracil
  modified_base 17: mod_base = OTHER; note = Uracil
  modified_base 18: mod_base = OTHER; note = Uracil
  modified_base 20: mod_base = OTHER; note = Uracil
tcaaggaagatggcatttct

SEQ ID NO: 11660 - DNA, 20 bp, synthetic construct
  misc_feature 1..20: note = Description of Artificial Sequence: Synthetic Antisense oligonucleotide
  misc_feature 1..20: note = Original Sequence: tcaaggaagauggcauuucu
  modified_base 1: mod_base = OTHER; note = bicyclic nucleic acid (BNA)
  modified_base 14: mod_base = OTHER; note = bicyclic nucleic acid (BNA)
  modified_base 19: mod_base = OTHER; note = bicyclic nucleic acid (BNA)
  source 1..20: mol_type = other DNA
  modified_base 11: mod_base = OTHER; note = Uracil
  modified_base 16: mod_base = OTHER; note = Uracil
  modified_base 17: mod_base = OTHER; note = Uracil
  modified_base 18: mod_base = OTHER; note = Uracil
  modified_base 20: mod_base = OTHER; note = Uracil
tcaaggaagatggcatttct

SEQ ID NO: 11661 - DNA, 20 bp, synthetic construct
  misc_feature 1..20: note = Description of Artificial Sequence: Synthetic Antisense oligonucleotide
  misc_feature 1..20: note = Original Sequence: tcaaggaagauggcauuucu
  modified_base 1: mod_base = OTHER; note = bicyclic nucleic acid (BNA)
  modified_base 9: mod_base = OTHER; note = bicyclic nucleic acid (BNA)
  modified_base 19: mod_base = OTHER; note = bicyclic nucleic acid (BNA)
  source 1..20: mol_type = other DNA
  modified_base 11: mod_base = OTHER; note = Uracil
  modified_base 16: mod_base = OTHER; note = Uracil
  modified_base 17: mod_base = OTHER; note = Uracil
  modified_base 18: mod_base = OTHER; note = Uracil
  modified_base 20: mod_base = OTHER; note = Uracil
tcaaggaagatggcatttct

SEQ ID NO: 11662 - DNA, 22 bp, synthetic construct
  misc_feature 1..22: note = Description of Artificial Sequence: Synthetic Antisense oligonucleotide
  misc_feature 1..22: note = Original Sequence: tcaaggaagauggcauuucuag
  modified_base 1: mod_base = OTHER; note = bicyclic nucleic acid (BNA)
  modified_base 9: mod_base = OTHER; note = bicyclic nucleic acid (BNA)
  modified_base 14: mod_base = OTHER; note = bicyclic nucleic acid (BNA)
  source 1..22: mol_type = other DNA
  modified_base 11: mod_base = OTHER; note = Uracil
  modified_base 16: mod_base = OTHER; note = Uracil
  modified_base 17: mod_base = OTHER; note = Uracil
  modified_base 18: mod_base = OTHER; note = Uracil
  modified_base 20: mod_base = OTHER; note = Uracil
tcaaggaagatggcatttctag

SEQ ID NO: 11663 - DNA, 22 bp, synthetic construct
  misc_feature 1..22: note = Description of Artificial Sequence: Synthetic Antisense oligonucleotide
  misc_feature 1..22: note = Original Sequence: tcaaggaagauggcauuucuag
  modified_base 1: mod_base = OTHER; note = bicyclic nucleic acid (BNA)
  modified_base 5: mod_base = OTHER; note = bicyclic nucleic acid (BNA)
  modified_base 9: mod_base = OTHER; note = bicyclic nucleic acid (BNA)
  source 1..22: mol_type = other DNA
  modified_base 11: mod_base = OTHER; note = Uracil
  modified_base 16: mod_base = OTHER; note = Uracil
  modified_base 17: mod_base = OTHER; note = Uracil
  modified_base 18: mod_base = OTHER; note = Uracil
  modified_base 20: mod_base = OTHER; note = Uracil
tcaaggaagatggcatttctag

SEQ ID NO: 11664 - DNA, 22 bp, synthetic construct
  misc_feature 1..22: note = Description of Artificial Sequence: Synthetic Antisense oligonucleotide
  misc_feature 1..22: note = Original Sequence: tcaaggaagauggcauuucuag
  modified_base 1: mod_base = OTHER; note = bicyclic nucleic acid (BNA)
  modified_base 5: mod_base = OTHER; note = bicyclic nucleic acid (BNA)
  modified_base 19: mod_base = OTHER; note = bicyclic nucleic acid (BNA)
  source 1..22: mol_type = other DNA
  modified_base 11: mod_base = OTHER; note = Uracil
  modified_base 16: mod_base = OTHER; note = Uracil
  modified_base 17: mod_base = OTHER; note = Uracil
  modified_base 18: mod_base = OTHER; note = Uracil
  modified_base 20: mod_base = OTHER; note = Uracil
tcaaggaagatggcatttctag

SEQ ID NO: 11665 - DNA, 22 bp, synthetic construct
  misc_feature 1..22: note = Description of Artificial Sequence: Synthetic Antisense oligonucleotide
  misc_feature 1..22: note = Original Sequence: tcaaggaagauggcauuucuag
  modified_base 1: mod_base = OTHER; note = bicyclic nucleic acid (BNA)
  modified_base 6: mod_base = OTHER; note = bicyclic nucleic acid (BNA)
  modified_base 14: mod_base = OTHER; note = bicyclic nucleic acid (BNA)
  source 1..22: mol_type = other DNA
  modified_base 11: mod_base = OTHER; note = Uracil
  modified_base 16: mod_base = OTHER; note = Uracil
  modified_base 17: mod_base = OTHER; note = Uracil
  modified_base 18: mod_base = OTHER; note = Uracil
  modified_base 20: mod_base = OTHER; note = Uracil
tcaaggaagatggcatttctag

SEQ ID NO: 11666 - DNA, 22 bp, synthetic construct
  misc_feature 1..22: note = Description of Artificial Sequence: Synthetic Antisense oligonucleotide
  misc_feature 1..22: note = Original Sequence: tcaaggaagauggcauuucuag
  modified_base 1: mod_base = OTHER; note = bicyclic nucleic acid (BNA)
  modified_base 5: mod_base = OTHER; note = bicyclic nucleic acid (BNA)
  modified_base 13: mod_base = OTHER; note = bicyclic nucleic acid (BNA)
  source 1..22: mol_type = other DNA
  modified_base 11: mod_base = OTHER; note = Uracil
  modified_base 16: mod_base = OTHER; note = Uracil
  modified_base 17: mod_base = OTHER; note = Uracil
  modified_base 18: mod_base = OTHER; note = Uracil
  modified_base 20: mod_base = OTHER; note = Uracil
tcaaggaagatggcatttctag

SEQ ID NO: 11667 - DNA, 22 bp, synthetic construct
  misc_feature 1..22: note = Description of Artificial Sequence: Synthetic Antisense oligonucleotide
  misc_feature 1..22: note = Original Sequence: tcaaggaagauggcauuucuag
  modified_base 1: mod_base = OTHER; note = bicyclic nucleic acid (BNA)
  modified_base 6: mod_base = OTHER; note = bicyclic nucleic acid (BNA)
  modified_base 9: mod_base = OTHER; note = bicyclic nucleic acid (BNA)
  source 1..22: mol_type = other DNA
  modified_base 11: mod_base = OTHER; note = Uracil
  modified_base 16: mod_base = OTHER; note = Uracil
  modified_base 17: mod_base = OTHER; note = Uracil
  modified_base 18: mod_base = OTHER; note = Uracil
  modified_base 20: mod_base = OTHER; note = Uracil
tcaaggaagatggcatttctag

SEQ ID NO: 11668 - DNA, 22 bp, synthetic construct
  misc_feature 1..22: note = Description of Artificial Sequence: Synthetic Antisense oligonucleotide
  misc_feature 1..22: note = Original Sequence: tcaaggaagauggcauuucuag
  modified_base 1: mod_base = OTHER; note = bicyclic nucleic acid (BNA)
  modified_base 13..14: mod_base = OTHER; note = bicyclic nucleic acid (BNA)
  source 1..22: mol_type = other DNA
  modified_base 11: mod_base = OTHER; note = Uracil
  modified_base 16: mod_base = OTHER; note = Uracil
  modified_base 17: mod_base = OTHER; note = Uracil
  modified_base 18: mod_base = OTHER; note = Uracil
  modified_base 20: mod_base = OTHER; note = Uracil
tcaaggaagatggcatttctag

SEQ ID NO: 11669 - DNA, 22 bp, synthetic construct
  misc_feature 1..22: note = Description of Artificial Sequence: Synthetic Antisense oligonucleotide
  misc_feature 1..22: note = Original Sequence: tcaaggaagauggcauuucuag
  modified_base 1: mod_base = OTHER; note = bicyclic nucleic acid (BNA)
  modified_base 6: mod_base = OTHER; note = bicyclic nucleic acid (BNA)
  modified_base 13: mod_base = OTHER; note = bicyclic nucleic acid (BNA)
  source 1..22: mol_type = other DNA
  modified_base 11: mod_base = OTHER; note = Uracil
  modified_base 16: mod_base = OTHER; note = Uracil
  modified_base 17: mod_base = OTHER; note = Uracil
  modified_base 18: mod_base = OTHER; note = Uracil
  modified_base 20: mod_base = OTHER; note = Uracil
tcaaggaagatggcatttctag

SEQ ID NO: 11670 - DNA, 22 bp, synthetic construct
  misc_feature 1..22: note = Description of Artificial Sequence: Synthetic Antisense oligonucleotide
  misc_feature 1..22: note = Original Sequence: tcaaggaagauggcauuucuag
  modified_base 1: mod_base = OTHER; note = bicyclic nucleic acid (BNA)
  modified_base 6: mod_base = OTHER; note = bicyclic nucleic acid (BNA)
  modified_base 19: mod_base = OTHER; note = bicyclic nucleic acid (BNA)
  source 1..22: mol_type = other DNA
  modified_base 11: mod_base = OTHER; note = Uracil
  modified_base 16: mod_base = OTHER; note = Uracil
  modified_base 17: mod_base = OTHER; note = Uracil
  modified_base 18: mod_base = OTHER; note = Uracil
  modified_base 20: mod_base = OTHER; note = Uracil
tcaaggaagatggcatttctag

SEQ ID NO: 11671 - DNA, 22 bp, synthetic construct
  misc_feature 1..22: note = Description of Artificial Sequence: Synthetic Antisense oligonucleotide
  misc_feature 1..22: note = Original Sequence: tcaaggaagauggcauuucuag
  modified_base 1: mod_base = OTHER; note = bicyclic nucleic acid (BNA)
  modified_base 5: mod_base = OTHER; note = bicyclic nucleic acid (BNA)
  modified_base 14: mod_base = OTHER; note = bicyclic nucleic acid (BNA)
  source 1..22: mol_type = other DNA
  modified_base 11: mod_base = OTHER; note = Uracil
  modified_base 16: mod_base = OTHER; note = Uracil
  modified_base 17: mod_base = OTHER; note = Uracil
  modified_base 18: mod_base = OTHER; note = Uracil
  modified_base 20: mod_base = OTHER; note = Uracil
tcaaggaagatggcatttctag

SEQ ID NO: 11672 - DNA, 22 bp, synthetic construct
  misc_feature 1..22: note = Description of Artificial Sequence: Synthetic Antisense oligonucleotide
  misc_feature 1..22: note = Original Sequence: tcaaggaagauggcauuucuag
  modified_base 1: mod_base = OTHER; note = bicyclic nucleic acid (BNA)
  modified_base 12: mod_base = OTHER; note = bicyclic nucleic acid (BNA)
  modified_base 19: mod_base = OTHER; note = bicyclic nucleic acid (BNA)
  source 1..22: mol_type = other DNA
  modified_base 11: mod_base = OTHER; note = Uracil
  modified_base 16: mod_base = OTHER; note = Uracil
  modified_base 17: mod_base = OTHER; note = Uracil
  modified_base 18: mod_base = OTHER; note = Uracil
  modified_base 20: mod_base = OTHER; note = Uracil
tcaaggaagatggcatttctag

SEQ ID NO: 11673 - DNA, 22 bp, synthetic construct
  misc_feature 1..22: note = Description of Artificial Sequence: Synthetic Antisense oligonucleotide
  misc_feature 1..22: note = Original Sequence: tcaaggaagauggcauuucuag
  modified_base 1: mod_base = OTHER; note = bicyclic nucleic acid (BNA)
  modified_base 12: mod_base = OTHER; note = bicyclic nucleic acid (BNA)
  modified_base 14: mod_base = OTHER; note = bicyclic nucleic acid (BNA)
  source 1..22: mol_type = other DNA
  modified_base 11: mod_base = OTHER; note = Uracil
  modified_base 16: mod_base = OTHER; note = Uracil
  modified_base 17: mod_base = OTHER; note = Uracil
  modified_base 18: mod_base = OTHER; note = Uracil
  modified_base 20: mod_base = OTHER; note = Uracil
tcaaggaagatggcatttctag

SEQ ID NO: 11674 - DNA, 22 bp, synthetic construct
  misc_feature 1..22: note = Description of Artificial Sequence: Synthetic Antisense oligonucleotide
  misc_feature 1..22: note = Original Sequence: tcaaggaagauggcauuucuag
  modified_base 1: mod_base = OTHER; note = bicyclic nucleic acid (BNA)
  modified_base 6: mod_base = OTHER; note = bicyclic nucleic acid (BNA)
  modified_base 12: mod_base = OTHER; note = bicyclic nucleic acid (BNA)
  source 1..22: mol_type = other DNA
  modified_base 11: mod_base = OTHER; note = Uracil
  modified_base 16: mod_base = OTHER; note = Uracil
  modified_base 17: mod_base = OTHER; note = Uracil
  modified_base 18: mod_base = OTHER; note = Uracil
  modified_base 20: mod_base = OTHER; note = Uracil
tcaaggaagatggcatttctag

SEQ ID NO: 11675 - DNA, 22 bp, synthetic construct
  misc_feature 1..22: note = Description of Artificial Sequence: Synthetic Antisense oligonucleotide
  misc_feature 1..22: note = Original Sequence: tcaaggaagauggcauuucuag
  modified_base 1: mod_base = OTHER; note = bicyclic nucleic acid (BNA)
  modified_base 5..6: mod_base = OTHER; note = bicyclic nucleic acid (BNA)
  source 1..22: mol_type = other DNA
  modified_base 11: mod_base = OTHER; note = Uracil
  modified_base 16: mod_base = OTHER; note = Uracil
  modified_base 17: mod_base = OTHER; note = Uracil
  modified_base 18: mod_base = OTHER; note = Uracil
  modified_base 20: mod_base = OTHER; note = Uracil
tcaaggaagatggcatttctag

SEQ ID NO: 11676 - DNA, 22 bp, synthetic construct
  misc_feature 1..22: note = Description of Artificial Sequence: Synthetic Antisense oligonucleotide
  misc_feature 1..22: note = Original Sequence: tcaaggaagauggcauuucuag
  modified_base 1: mod_base = OTHER; note = bicyclic nucleic acid (BNA)
  modified_base 9: mod_base = OTHER; note = bicyclic nucleic acid (BNA)
  modified_base 12: mod_base = OTHER; note = bicyclic nucleic acid (BNA)
  source 1..22: mol_type = other DNA
  modified_base 11: mod_base = OTHER; note = Uracil
  modified_base 16: mod_base = OTHER; note = Uracil
  modified_base 17: mod_base = OTHER; note = Uracil
  modified_base 18: mod_base = OTHER; note = Uracil
  modified_base 20: mod_base = OTHER; note = Uracil
tcaaggaagatggcatttctag

SEQ ID NO: 11677 - DNA, 22 bp, synthetic construct
  misc_feature 1..22: note = Description of Artificial Sequence: Synthetic Antisense oligonucleotide
  misc_feature 1..22: note = Original Sequence: tcaaggaagauggcauuucuag
  modified_base 1: mod_base = OTHER; note = bicyclic nucleic acid (BNA)
  modified_base 13: mod_base = OTHER; note = bicyclic nucleic acid (BNA)
  modified_base 19: mod_base = OTHER; note = bicyclic nucleic acid (BNA)
  source 1..22: mol_type = other DNA
  modified_base 11: mod_base = OTHER; note = Uracil
  modified_base 16: mod_base = OTHER; note = Uracil
  modified_base 17: mod_base = OTHER; note = Uracil
  modified_base 18: mod_base = OTHER; note = Uracil
  modified_base 20: mod_base = OTHER; note = Uracil
tcaaggaagatggcatttctag

SEQ ID NO: 11678 - DNA, 22 bp, synthetic construct
  misc_feature 1..22: note = Description of Artificial Sequence: Synthetic Antisense oligonucleotide
  misc_feature 1..22: note = Original Sequence: tcaaggaagauggcauuucuag
  modified_base 1: mod_base = OTHER; note = bicyclic nucleic acid (BNA)
  modified_base 12..13: mod_base = OTHER; note = bicyclic nucleic acid (BNA)
  source 1..22: mol_type = other DNA
  modified_base 11: mod_base = OTHER; note = Uracil
  modified_base 16: mod_base = OTHER; note = Uracil
  modified_base 17: mod_base = OTHER; note = Uracil
  modified_base 18: mod_base = OTHER; note = Uracil
  modified_base 20: mod_base = OTHER; note = Uracil
tcaaggaagatggcatttctag

SEQ ID NO: 11679 - DNA, 22 bp, synthetic construct
  misc_feature 1..22: note = Description of Artificial Sequence: Synthetic Antisense oligonucleotide
  misc_feature 1..22: note = Original Sequence: tcaaggaagauggcauuucuag
  modified_base 1: mod_base = OTHER; note = bicyclic nucleic acid (BNA)
  modified_base 5: mod_base = OTHER; note = bicyclic nucleic acid (BNA)
  modified_base 12: mod_base = OTHER; note = bicyclic nucleic acid (BNA)
  source 1..22: mol_type = other DNA
  modified_base 11: mod_base = OTHER; note = Uracil
  modified_base 16: mod_base = OTHER; note = Uracil
  modified_base 17: mod_base = OTHER; note = Uracil
  modified_base 18: mod_base = OTHER; note = Uracil
  modified_base 20: mod_base = OTHER; note = Uracil
tcaaggaagatggcatttctag

SEQ ID NO: 11680 - DNA, 22 bp, synthetic construct
  misc_feature 1..22: note = Description of Artificial Sequence: Synthetic Antisense oligonucleotide
  misc_feature 1..22: note = Original Sequence: tcaaggaagauggcauuucuag
  modified_base 1: mod_base = OTHER; note = bicyclic nucleic acid (BNA)
  modified_base 9: mod_base = OTHER; note = bicyclic nucleic acid (BNA)
  modified_base 13: mod_base = OTHER; note = bicyclic nucleic acid (BNA)
  source 1..22: mol_type = other DNA
  modified_base 11: mod_base = OTHER; note = Uracil
  modified_base 16: mod_base = OTHER; note = Uracil
  modified_base 17: mod_base = OTHER; note = Uracil
  modified_base 18: mod_base = OTHER; note = Uracil
  modified_base 20: mod_base = OTHER; note = Uracil
tcaaggaagatggcatttctag

SEQ ID NO: 11681 - DNA, 22 bp, synthetic construct
  misc_feature 1..22: note = Description of Artificial Sequence: Synthetic Antisense oligonucleotide
  misc_feature 1..22: note = Original Sequence: tcaaggaagauggcauuucuag
  modified_base 1: mod_base = OTHER; note = bicyclic nucleic acid (BNA)
  modified_base 14: mod_base = OTHER; note = bicyclic nucleic acid (BNA)
  modified_base 19: mod_base = OTHER; note = bicyclic nucleic acid (BNA)
  source 1..22: mol_type = other DNA
  modified_base 11: mod_base = OTHER; note = Uracil
  modified_base 16: mod_base = OTHER; note = Uracil
  modified_base 17: mod_base = OTHER; note = Uracil
  modified_base 18: mod_base = OTHER; note = Uracil
  modified_base 20: mod_base = OTHER; note = Uracil
tcaaggaagatggcatttctag

SEQ ID NO: 11682 - DNA, 22 bp, synthetic construct
  misc_feature 1..22: note = Description of Artificial Sequence: Synthetic Antisense oligonucleotide
  misc_feature 1..22: note = Original Sequence: tcaaggaagauggcauuucuag
  modified_base 1: mod_base = OTHER; note = bicyclic nucleic acid (BNA)
  modified_base 9: mod_base = OTHER; note = bicyclic nucleic acid (BNA)
  modified_base 19: mod_base = OTHER; note = bicyclic nucleic acid (BNA)
  source 1..22: mol_type = other DNA
  modified_base 11: mod_base = OTHER; note = Uracil
  modified_base 16: mod_base = OTHER; note = Uracil
  modified_base 17: mod_base = OTHER; note = Uracil
  modified_base 18: mod_base = OTHER; note = Uracil
  modified_base 20: mod_base = OTHER; note = Uracil
tcaaggaagatggcatttctag

SEQ ID NO: 11683 - RNA, 18 nt, synthetic construct
  misc_feature 1..18: note = Description of Artificial Sequence: Synthetic Antisense oligonucleotide
  modified_base 1: mod_base = OTHER; note = bicyclic nucleic acid (BNA)
  modified_base 9: mod_base = OTHER; note = bicyclic nucleic acid (BNA)
  modified_base 9: mod_base = OTHER; note = 5-methyl
  modified_base 13..14: mod_base = OTHER; note = 5-methyl
  modified_base 18: mod_base = OTHER; note = 5-methyl
  source 1..18: mol_type = other RNA
ggtaagttctgtccaagc

SEQ ID NO: 11684 - RNA, 18 nt, synthetic construct
  misc_feature 1..18: note = Description of Artificial Sequence: Synthetic Antisense oligonucleotide
  modified_base 1: mod_base = OTHER; note = bicyclic nucleic acid (BNA)
  modified_base 11: mod_base = OTHER; note = bicyclic nucleic acid (BNA)
  modified_base 9: mod_base = OTHER; note = 5-methyl
  modified_base 13..14: mod_base = OTHER; note = 5-methyl
  modified_base 18: mod_base = OTHER; note = 5-methyl
  source 1..18: mol_type = other RNA
ggtaagttctgtccaagc

SEQ ID NO: 11685 - RNA, 18 nt, synthetic construct
  misc_feature 1..18: note = Description of Artificial Sequence: Synthetic Antisense oligonucleotide
  modified_base 1: mod_base = OTHER; note = bicyclic nucleic acid (BNA)
  modified_base 6: mod_base = OTHER; note = bicyclic nucleic acid (BNA)
  modified_base 9: mod_base = OTHER; note = 5-methyl
  modified_base 13..14: mod_base = OTHER; note = 5-methyl
  modified_base 18: mod_base = OTHER; note = 5-methyl
  source 1..18: mol_type = other RNA
ggtaagttctgtccaagc

SEQ ID NO: 11686 - RNA, 18 nt, synthetic construct
  misc_feature 1..18: note = Description of Artificial Sequence: Synthetic Antisense oligonucleotide
  modified_base 1: mod_base = OTHER; note = bicyclic nucleic acid (BNA)
  modified_base 17: mod_base = OTHER; note = bicyclic nucleic acid (BNA)
  modified_base 9: mod_base = OTHER; note = 5-methyl
  modified_base 13..14: mod_base = OTHER; note = 5-methyl
  modified_base 18: mod_base = OTHER; note = 5-methyl
  source 1..18: mol_type = other RNA
ggtaagttctgtccaagc

SEQ ID NO: 11687 - RNA, 18 nt, synthetic construct
  misc_feature 1..18: note = Description of Artificial Sequence: Synthetic Antisense oligonucleotide
  modified_base 1: mod_base = OTHER; note = bicyclic nucleic acid (BNA)
  modified_base 13: mod_base = OTHER; note = bicyclic nucleic acid (BNA)
  modified_base 9: mod_base = OTHER; note = 5-methyl
  modified_base 13..14: mod_base = OTHER; note = 5-methyl
  modified_base 18: mod_base = OTHER; note = 5-methyl
  source 1..18: mol_type = other RNA
ggtaagttctgtccaagc

SEQ ID NO: 11688 - RNA, 18 nt, synthetic construct
  misc_feature 1..18: note = Description of Artificial Sequence: Synthetic Antisense oligonucleotide
  modified_base 1: mod_base = OTHER; note = bicyclic nucleic acid (BNA)
  modified_base 14: mod_base = OTHER; note = bicyclic nucleic acid (BNA)
  modified_base 9: mod_base = OTHER; note = 5-methyl
  modified_base 13..14: mod_base = OTHER; note = 5-methyl
  modified_base 18: mod_base = OTHER; note = 5-methyl
  source 1..18: mol_type = other RNA
ggtaagttctgtccaagc

SEQ ID NO: 11689 - RNA, 18 nt, synthetic construct
  misc_feature 1..18: note = Description of Artificial Sequence: Synthetic Antisense oligonucleotide
  modified_base 1: mod_base = OTHER; note = bicyclic nucleic acid (BNA)
  modified_base 16: mod_base = OTHER; note = bicyclic nucleic acid (BNA)
  modified_base 8: mod_base = OTHER; note = 5-methyl
  modified_base 12..13: mod_base = OTHER; note = 5-methyl
  modified_base 17..18: mod_base = OTHER; note = 5-methyl
  source 1..18: mol_type = other RNA
gtaagttctgtccaagcc

SEQ ID NO: 11690 - RNA, 18 nt, synthetic construct
  misc_feature 1..18: note = Description of Artificial Sequence: Synthetic Antisense oligonucleotide
  modified_base 1: mod_base = OTHER; note = bicyclic nucleic acid (BNA)
  modified_base 10: mod_base = OTHER; note = bicyclic nucleic acid (BNA)
  modified_base 8: mod_base = OTHER; note = 5-methyl
  modified_base 12..13: mod_base = OTHER; note = 5-methyl
  modified_base 17..18: mod_base = OTHER; note = 5-methyl
  source 1..18: mol_type = other RNA
gtaagttctgtccaagcc

SEQ ID NO: 11691 - RNA, 18 nt, synthetic construct
  misc_feature 1..18: note = Description of Artificial Sequence: Synthetic Antisense oligonucleotide
  modified_base 1: mod_base = OTHER; note = bicyclic nucleic acid (BNA)
  modified_base 5: mod_base = OTHER; note = bicyclic nucleic acid (BNA)
  modified_base 8: mod_base = OTHER; note = 5-methyl
  modified_base 12..13: mod_base = OTHER; note = 5-methyl
  modified_base 17..18: mod_base = OTHER; note = 5-methyl
  source 1..18: mol_type = other RNA
gtaagttctgtccaagcc

SEQ ID NO: 11692 - RNA, 18 nt, synthetic construct
  misc_feature 1..18: note = Description of Artificial Sequence: Synthetic Antisense oligonucleotide
  modified_base 1: mod_base = OTHER; note = bicyclic nucleic acid (BNA)
  modified_base 17: mod_base = OTHER; note = bicyclic nucleic acid (BNA)
  modified_base 8: mod_base = OTHER; note = 5-methyl
  modified_base 12..13: mod_base = OTHER; note = 5-methyl
  modified_base 17..18: mod_base = OTHER; note = 5-methyl
  source 1..18: mol_type = other RNA
gtaagttctgtccaagcc

SEQ ID NO: 11693 - RNA, 18 nt, synthetic construct
  misc_feature 1..18: note = Description of Artificial Sequence: Synthetic Antisense oligonucleotide
  modified_base 1: mod_base = OTHER; note = bicyclic nucleic acid (BNA)
  modified_base 12: mod_base = OTHER; note = bicyclic nucleic acid (BNA)
  modified_base 8: mod_base = OTHER; note = 5-methyl
  modified_base 12..13: mod_base = OTHER; note = 5-methyl
  modified_base 17..18: mod_base = OTHER; note = 5-methyl
  source 1..18: mol_type = other RNA
gtaagttctgtccaagcc

SEQ ID NO: 11694 - RNA, 18 nt, synthetic construct
  misc_feature 1..18: note = Description of Artificial Sequence: Synthetic Antisense oligonucleotide
  modified_base 1: mod_base = OTHER; note = bicyclic nucleic acid (BNA)
  modified_base 13: mod_base = OTHER; note = bicyclic nucleic acid (BNA)
  modified_base 8: mod_base = OTHER; note = 5-methyl
  modified_base 12..13: mod_base = OTHER; note = 5-methyl
  modified_base 17..18: mod_base = OTHER; note = 5-methyl
  source 1..18: mol_type = other RNA
gtaagttctgtccaagcc

SEQ ID NO: 11695 - RNA, 18 nt, synthetic construct
  misc_feature 1..18: note = Description of Artificial Sequence: Synthetic Antisense oligonucleotide
  modified_base 1: mod_base = OTHER; note = bicyclic nucleic acid (BNA)
  modified_base 8: mod_base = OTHER; note = bicyclic nucleic acid (BNA)
  modified_base 8: mod_base = OTHER; note = 5-methyl
  modified_base 12..13: mod_base = OTHER; note = 5-methyl
  modified_base 17..18: mod_base = OTHER; note = 5-methyl
  source 1..18: mol_type = other RNA
gtaagttctgtccaagcc

SEQ ID NO: 11696 - RNA, 18 nt, synthetic construct
  misc_feature 1..18: note = Description of Artificial Sequence: Synthetic Antisense oligonucleotide
  modified_base 1: mod_base = OTHER; note = bicyclic nucleic acid (BNA)
  modified_base 4: mod_base = OTHER; note = bicyclic nucleic acid (BNA)
  modified_base 4: mod_base = OTHER; note = 5-methyl
  modified_base 13: mod_base = OTHER; note = 5-methyl
  modified_base 17..18: mod_base = OTHER; note = 5-methyl
  source 1..18: mol_type = other RNA
agtcggtaagttctgtcc

SEQ ID NO: 11697 - RNA, 18 nt, synthetic construct
  misc_feature 1..18: note = Description of Artificial Sequence: Synthetic Antisense oligonucleotide
  modified_base 1: mod_base = OTHER; note = bicyclic nucleic acid (BNA)
  modified_base 10: mod_base = OTHER; note = bicyclic nucleic acid (BNA)
  modified_base 4: mod_base = OTHER; note = 5-methyl
  modified_base 13: mod_base = OTHER; note = 5-methyl
  modified_base 17..18: mod_base = OTHER; note = 5-methyl
  source 1..18: mol_type = other RNA
agtcggtaagttctgtcc

SEQ ID NO: 11698 - RNA, 18 nt, synthetic construct
  misc_feature 1..18: note = Description of Artificial Sequence: Synthetic Antisense oligonucleotide
  modified_base 1: mod_base = OTHER; note = bicyclic nucleic acid (BNA)
  modified_base 5: mod_base = OTHER; note = bicyclic nucleic acid (BNA)
  modified_base 4: mod_base = OTHER; note = 5-methyl
  modified_base 13: mod_base = OTHER; note = 5-methyl
  modified_base 17..18: mod_base = OTHER; note = 5-methyl
  source 1..18: mol_type = other RNA
agtcggtaagttctgtcc

SEQ ID NO: 11699 - RNA, 18 nt, synthetic construct
  misc_feature 1..18: note = Description of Artificial Sequence: Synthetic Antisense oligonucleotide
  modified_base 1: mod_base = OTHER; note = bicyclic nucleic acid (BNA)
  modified_base 6: mod_base = OTHER; note = bicyclic nucleic acid (BNA)
  modified_base 4: mod_base = OTHER; note = 5-methyl
  modified_base 13: mod_base = OTHER; note = 5-methyl
  modified_base 17..18: mod_base = OTHER; note = 5-methyl
  source 1..18: mol_type = other RNA
agtcggtaagttctgtcc

SEQ ID NO: 11700 - RNA, 18 nt, synthetic construct
  misc_feature 1..18: note = Description of Artificial Sequence: Synthetic Antisense oligonucleotide
  modified_base 1: mod_base = OTHER; note = bicyclic nucleic acid (BNA)
  modified_base 17: mod_base = OTHER; note = bicyclic nucleic acid (BNA)
  modified_base 4: mod_base = OTHER; note = 5-methyl
  modified_base 13: mod_base = OTHER; note = 5-methyl
  modified_base 17..18: mod_base = OTHER; note = 5-methyl
  source 1..18: mol_type = other RNA
agtcggtaagttctgtcc

SEQ ID NO: 11701 - RNA, 18 nt, synthetic construct
  misc_feature 1..18: note = Description of Artificial Sequence: Synthetic Antisense oligonucleotide
  modified_base 1: mod_base = OTHER; note = bicyclic nucleic acid (BNA)
  modified_base 13: mod_base = OTHER; note = bicyclic nucleic acid (BNA)
  modified_base 4: mod_base = OTHER; note = 5-methyl
  modified_base 13: mod_base = OTHER; note = 5-methyl
  modified_base 17..18: mod_base = OTHER; note = 5-methyl
  source 1..18: mol_type = other RNA
agtcggtaagttctgtcc

SEQ ID NO: 11702 - RNA, 18 nt, synthetic construct
  misc_feature 1..18: note = Description of Artificial Sequence: Synthetic Antisense oligonucleotide
  modified_base 1: mod_base = OTHER; note = bicyclic nucleic acid (BNA)
  modified_base 15: mod_base = OTHER; note = bicyclic nucleic acid (BNA)
  modified_base 4: mod_base = OTHER; note = 5-methyl
  modified_base 13: mod_base = OTHER; note = 5-methyl
  modified_base 17..18: mod_base = OTHER; note = 5-methyl
  source 1..18: mol_type = other RNA
agtcggtaagttctgtcc

SEQ ID NO: 11703 - RNA, 18 nt, synthetic construct
  misc_feature 1..18: note = Description of Artificial Sequence: Synthetic Antisense oligonucleotide
  modified_base 1: mod_base = OTHER; note = 5-methyl
  modified_base 5..6: mod_base = OTHER; note = 5-methyl
  modified_base 10..12: mod_base = OTHER; note = 5-methyl
  modified_base 1: mod_base = OTHER; note = bicyclic nucleic acid (BNA)
  modified_base 3: mod_base = OTHER; note = bicyclic nucleic acid (BNA)
  source 1..18: mol_type = other RNA
ctgtccaagcccggttga

SEQ ID NO: 11704 - RNA, 18 nt, synthetic construct
  misc_feature 1..18: note = Description of Artificial Sequence: Synthetic Antisense oligonucleotide
  modified_base 1: mod_base = OTHER; note = 5-methyl
  modified_base 5..6: mod_base = OTHER; note = 5-methyl
  modified_base 10..12: mod_base = OTHER; note = 5-methyl
  modified_base 1: mod_base = OTHER; note = bicyclic nucleic acid (BNA)
  modified_base 9: mod_base = OTHER; note = bicyclic nucleic acid (BNA)
  source 1..18: mol_type = other RNA
ctgtccaagcccggttga

SEQ ID NO: 11705 - RNA, 18 nt, synthetic construct
  misc_feature 1..18: note = Description of Artificial Sequence: Synthetic Antisense oligonucleotide
  modified_base 1: mod_base = OTHER; note = 5-methyl
  modified_base 5..6: mod_base = OTHER; note = 5-methyl
  modified_base 10..12: mod_base = OTHER; note = 5-methyl
  modified_base 1: mod_base = OTHER; note = bicyclic nucleic acid (BNA)
  modified_base 10: mod_base = OTHER; note = bicyclic nucleic acid (BNA)
  source 1..18: mol_type = other RNA
ctgtccaagcccggttga

SEQ ID NO: 11706 - RNA, 18 nt, synthetic construct
  misc_feature 1..18: note = Description of Artificial Sequence: Synthetic Antisense oligonucleotide
  modified_base 1: mod_base = OTHER; note = 5-methyl
  modified_base 5..6: mod_base = OTHER; note = 5-methyl
  modified_base 10..12: mod_base = OTHER; note = 5-methyl
  modified_base 1: mod_base = OTHER; note = bicyclic nucleic acid (BNA)
  modified_base 5: mod_base = OTHER; note = bicyclic nucleic acid (BNA)
  source 1..18: mol_type = other RNA
ctgtccaagcccggttga

SEQ ID NO: 11707 - RNA, 18 nt, synthetic construct
  misc_feature 1..18: note = Description of Artificial Sequence: Synthetic Antisense oligonucleotide
  modified_base 1: mod_base = OTHER; note = 5-methyl
  modified_base 5..6: mod_base = OTHER; note = 5-methyl
  modified_base 10..12: mod_base = OTHER; note = 5-methyl
  modified_base 1: mod_base = OTHER; note = bicyclic nucleic acid (BNA)
  modified_base 11: mod_base = OTHER; note = bicyclic nucleic acid (BNA)
  source 1..18: mol_type = other RNA
ctgtccaagcccggttga

SEQ ID NO: 11708 - RNA, 18 nt, synthetic construct
  misc_feature 1..18: note = Description of Artificial Sequence: Synthetic Antisense oligonucleotide
  modified_base 1: mod_base = OTHER; note = 5-methyl
  modified_base 5..6: mod_base = OTHER; note = 5-methyl
  modified_base 10..12: mod_base = OTHER; note = 5-methyl
  modified_base 1: mod_base = OTHER; note = bicyclic nucleic acid (BNA)
  modified_base 6: mod_base = OTHER; note = bicyclic nucleic acid (BNA)
  source 1..18: mol_type = other RNA
ctgtccaagcccggttga

SEQ ID NO: 11709 - RNA, 18 nt, synthetic construct
  misc_feature 1..18: note = Description of Artificial Sequence: Synthetic Antisense oligonucleotide
  modified_base 1: mod_base = OTHER; note = 5-methyl
  modified_base 5..6: mod_base = OTHER; note = 5-methyl
  modified_base 10..12: mod_base = OTHER; note = 5-methyl
  modified_base 1: mod_base = OTHER; note = bicyclic nucleic acid (BNA)
  modified_base 17: mod_base = OTHER; note = bicyclic nucleic acid (BNA)
  source 1..18: mol_type = other RNA
ctgtccaagcccggttga

SEQ ID NO: 11710 - RNA, 18 nt, synthetic construct
  misc_feature 1..18: note = Description of Artificial Sequence: Synthetic Antisense oligonucleotide
  modified_base 1: mod_base = OTHER; note = 5-methyl
  modified_base 5..6: mod_base = OTHER; note = 5-methyl
  modified_base 10..12: mod_base = OTHER; note = 5-methyl
  modified_base 1: mod_base = OTHER; note = bicyclic nucleic acid (BNA)
  modified_base 12: mod_base = OTHER; note = bicyclic nucleic acid (BNA)
  source 1..18: mol_type = other RNA
ctgtccaagcccggttga

SEQ ID NO: 11711 - RNA, 18 nt, synthetic construct
  misc_feature 1..18: note = Description of Artificial Sequence: Synthetic Antisense oligonucleotide
  modified_base 1: mod_base = OTHER; note = 5-methyl
  modified_base 5..6: mod_base = OTHER; note = 5-methyl
  modified_base 10..12: mod_base = OTHER; note = 5-methyl
  modified_base 1: mod_base = OTHER; note = bicyclic nucleic acid (BNA)
  modified_base 13: mod_base = OTHER; note = bicyclic nucleic acid (BNA)
  source 1..18: mol_type = other RNA
ctgtccaagcccggttga

SEQ ID NO: 11712 - RNA, 18 nt, synthetic construct
  misc_feature 1..18: note = Description of Artificial Sequence: Synthetic Antisense oligonucleotide
  modified_base 1: mod_base = OTHER; note = 5-methyl
  modified_base 5..6: mod_base = OTHER; note = 5-methyl
  modified_base 10..12: mod_base = OTHER; note = 5-methyl
  modified_base 1: mod_base = OTHER; note = bicyclic nucleic acid (BNA)
  modified_base 14: mod_base = OTHER; note = bicyclic nucleic acid (BNA)
  source 1..18: mol_type = other RNA
ctgtccaagcccggttga

SEQ ID NO: 11713 - RNA, 18 nt, synthetic construct
  misc_feature 1..18: note = Description of Artificial Sequence: Synthetic Antisense oligonucleotide
  modified_base 1: mod_base = OTHER; note = bicyclic nucleic acid (BNA)
  modified_base 6: mod_base = OTHER; note = bicyclic nucleic acid (BNA)
  modified_base 11: mod_base = OTHER; note = bicyclic nucleic acid (BNA)
  modified_base 9: mod_base = OTHER; note = 5-methyl
  modified_base 13..14: mod_base = OTHER; note = 5-methyl
  modified_base 18: mod_base = OTHER; note = 5-methyl
  source 1..18: mol_type = other RNA
ggtaagttctgtccaagc

SEQ ID NO: 11714 - RNA, 18 nt, synthetic construct
  misc_feature 1..18: note = Description of Artificial Sequence: Synthetic Antisense oligonucleotide
  modified_base 1: mod_base = OTHER; note = bicyclic nucleic acid (BNA)
  modified_base 9: mod_base = OTHER; note = bicyclic nucleic acid (BNA)
  modified_base 14: mod_base = OTHER; note = bicyclic nucleic acid (BNA)
  modified_base 9: mod_base = OTHER; note = 5-methyl
  modified_base 13..14: mod_base = OTHER; note = 5-methyl
  modified_base 18: mod_base = OTHER; note = 5-methyl
  source 1..18: mol_type = other RNA
ggtaagttctgtccaagc

SEQ ID NO: 11715 - RNA, 18 nt, synthetic construct
  misc_feature 1..18: note = Description of Artificial Sequence: Synthetic Antisense oligonucleotide
  modified_base 1: mod_base = OTHER; note = bicyclic nucleic acid (BNA)
  modified_base 6: mod_base = OTHER; note = bicyclic nucleic acid (BNA)
  modified_base 17: mod_base = OTHER; note = bicyclic nucleic acid (BNA)
  modified_base 9: mod_base = OTHER; note = 5-methyl
  modified_base 13..14: mod_base = OTHER; note = 5-methyl
  modified_base 18: mod_base = OTHER; note = 5-methyl
  source 1..18: mol_type = other RNA
ggtaagttctgtccaagc

SEQ ID NO: 11716 - RNA, 18 nt, synthetic construct
  misc_feature 1..18: note = Description of Artificial Sequence: Synthetic Antisense oligonucleotide
  modified_base 1: mod_base = OTHER; note = bicyclic nucleic acid (BNA)
  modified_base 9: mod_base = OTHER; note = bicyclic nucleic acid (BNA)
  modified_base 13: mod_base = OTHER; note = bicyclic nucleic acid (BNA)
  modified_base 9: mod_base = OTHER; note = 5-methyl
  modified_base 13..14: mod_base = OTHER; note = 5-methyl
  modified_base 18: mod_base = OTHER; note = 5-methyl
  source 1..18: mol_type = other RNA
ggtaagttctgtccaagc

SEQ ID NO: 11717 - RNA, 18 nt, synthetic construct
  misc_feature 1..18: note = Description of Artificial Sequence: Synthetic Antisense oligonucleotide
  modified_base 1: mod_base = OTHER; note = bicyclic nucleic acid (BNA)
  modified_base 13..14: mod_base = OTHER; note = bicyclic nucleic acid (BNA)
  modified_base 9: mod_base = OTHER; note = 5-methyl
  modified_base 13..14: mod_base = OTHER; note = 5-methyl
  modified_base 18: mod_base = OTHER; note = 5-methyl
  source 1..18: mol_type = other RNA
ggtaagttctgtccaagc

SEQ ID NO: 11718 - RNA, 18 nt, synthetic construct
  misc_feature 1..18: note = Description of Artificial Sequence: Synthetic Antisense oligonucleotide
  modified_base 1: mod_base = OTHER; note = bicyclic nucleic acid (BNA)
  modified_base 11: mod_base = OTHER; note = bicyclic nucleic acid (BNA)
  modified_base 17: mod_base = OTHER; note = bicyclic nucleic acid (BNA)
  modified_base 9: mod_base = OTHER; note = 5-methyl
  modified_base 13..14: mod_base = OTHER; note = 5-methyl
  modified_base 18: mod_base = OTHER; note = 5-methyl
  source 1..18: mol_type = other RNA
ggtaagttctgtccaagc

SEQ ID NO: 11719 - RNA, 18 nt, synthetic construct
  misc_feature 1..18: note = Description of Artificial Sequence: Synthetic Antisense oligonucleotide
  modified_base 1: mod_base = OTHER; note = bicyclic nucleic acid (BNA)
  modified_base 11: mod_base = OTHER; note = bicyclic nucleic acid (BNA)
  modified_base 14: mod_base = OTHER; note = bicyclic nucleic acid (BNA)
  modified_base 9: mod_base = OTHER; note = 5-methyl
  modified_base 13..14: mod_base = OTHER; note = 5-methyl
  modified_base 18: mod_base = OTHER; note = 5-methyl
  source 1..18: mol_type = other RNA
ggtaagttctgtccaagc

SEQ ID NO: 11720 - RNA, 18 nt, synthetic construct
  misc_feature 1..18: note = Description of Artificial Sequence: Synthetic Antisense oligonucleotide
  modified_base 1: mod_base = OTHER; note = bicyclic nucleic acid (BNA)
  modified_base 6: mod_base = OTHER; note = bicyclic nucleic acid (BNA)
  modified_base 13: mod_base = OTHER; note = bicyclic nucleic acid (BNA)
  modified_base 9: mod_base = OTHER; note = 5-methyl
  modified_base 13..14: mod_base = OTHER; note = 5-methyl
  modified_base 18: mod_base = OTHER; note = 5-methyl
  source 1..18: mol_type = other RNA
ggtaagttctgtccaagc

SEQ ID NO: 11721 - RNA, 18 nt, synthetic construct
  misc_feature 1..18: note = Description of Artificial Sequence: Synthetic Antisense oligonucleotide
  modified_base 1: mod_base = OTHER; note = bicyclic nucleic acid (BNA)
  modified_base 6: mod_base = OTHER; note = bicyclic nucleic acid (BNA)
  modified_base 14: mod_base = OTHER; note = bicyclic nucleic acid (BNA)
  modified_base 9: mod_base = OTHER; note = 5-methyl
  modified_base 13..14: mod_base = OTHER; note = 5-methyl
  modified_base 18: mod_base = OTHER; note = 5-methyl
  source 1..18: mol_type = other RNA
ggtaagttctgtccaagc

SEQ ID NO: 11722 - RNA, 18 nt, synthetic construct
  misc_feature 1..18: note = Description of Artificial Sequence: Synthetic Antisense oligonucleotide
  modified_base 1: mod_base = OTHER; note = bicyclic nucleic acid (BNA)
  modified_base 14: mod_base = OTHER; note = bicyclic nucleic acid (BNA)
  modified_base 17: mod_base = OTHER; note = bicyclic nucleic acid (BNA)
  modified_base 9: mod_base = OTHER; note = 5-methyl
  modified_base 13..14: mod_base = OTHER; note = 5-methyl
  modified_base 18: mod_base = OTHER; note = 5-methyl
  source 1..18: mol_type = other RNA
ggtaagttctgtccaagc

SEQ ID NO: 11723 - RNA, 18 nt, synthetic construct
  misc_feature 1..18: note = Description of Artificial Sequence: Synthetic Antisense oligonucleotide
  modified_base 1: mod_base = OTHER; note = bicyclic nucleic acid (BNA)
  modified_base 9: mod_base = OTHER; note = bicyclic nucleic acid (BNA)
  modified_base 11: mod_base = OTHER; note = bicyclic nucleic acid (BNA)
  modified_base 9: mod_base = OTHER; note = 5-methyl
  modified_base 13..14: mod_base = OTHER; note = 5-methyl
  modified_base 18: mod_base = OTHER; note = 5-methyl
  source 1..18: mol_type = other RNA
ggtaagttctgtccaagc

SEQ ID NO: 11724 - RNA, 18 nt, synthetic construct
  misc_feature 1..18: note = Description of Artificial Sequence: Synthetic Antisense oligonucleotide
  modified_base 1: mod_base = OTHER; note = bicyclic nucleic acid (BNA)
  modified_base 11: mod_base = OTHER; note = bicyclic nucleic acid (BNA)
  modified_base 13: mod_base = OTHER; note = bicyclic nucleic acid (BNA)
  modified_base 9: mod_base = OTHER; note = 5-methyl
  modified_base 13..14: mod_base = OTHER; note = 5-methyl
  modified_base 18: mod_base = OTHER; note = 5-methyl
  source 1..18: mol_type = other RNA
ggtaagttctgtccaagc

SEQ ID NO: 11725 - RNA, 18 nt, synthetic construct
  misc_feature 1..18: note = Description of Artificial Sequence: Synthetic Antisense oligonucleotide
  modified_base 1: mod_base = OTHER; note = bicyclic nucleic acid (BNA)
  modified_base 13: mod_base = OTHER; note = bicyclic nucleic acid (BNA)
  modified_base 17: mod_base = OTHER; note = bicyclic nucleic acid (BNA)
  modified_base 9: mod_base = OTHER; note = 5-methyl
  modified_base 13..14: mod_base = OTHER; note = 5-methyl
  modified_base 18: mod_base = OTHER; note = 5-methyl
  source 1..18: mol_type = other RNA
ggtaagttctgtccaagc

SEQ ID NO: 11726 - RNA, 18 nt, synthetic construct
  misc_feature 1..18: note = Description of Artificial Sequence: Synthetic Antisense oligonucleotide
  modified_base 1: mod_base = OTHER; note = bicyclic nucleic acid (BNA)
  modified_base 9: mod_base = OTHER; note = bicyclic nucleic acid (BNA)
  modified_base 17: mod_base = OTHER; note = bicyclic nucleic acid (BNA)
  modified_base 9: mod_base = OTHER; note = 5-methyl
  modified_base 13..14: mod_base = OTHER; note = 5-methyl
  modified_base 18: mod_base = OTHER; note = 5-methyl
  source 1..18: mol_type = other RNA
ggtaagttctgtccaagc

SEQ ID NO: 11727 - RNA, 18 nt, synthetic construct
  misc_feature 1..18: note = Description of Artificial Sequence: Synthetic Antisense oligonucleotide
  modified_base 1: mod_base = OTHER; note = bicyclic nucleic acid (BNA)
  modified_base 6: mod_base = OTHER; note = bicyclic nucleic acid (BNA)
  modified_base 9: mod_base = OTHER; note = bicyclic nucleic acid (BNA)
  modified_base 9: mod_base = OTHER; note = 5-methyl
  modified_base 13..14: mod_base = OTHER; note = 5-methyl
  modified_base 18: mod_base = OTHER; note = 5-methyl
  source 1..18: mol_type = other RNA
ggtaagttctgtccaagc

SEQ ID NO: 11728 - RNA, 18 nt, synthetic construct
  misc_feature 1..18: note = Description of Artificial Sequence: Synthetic Antisense oligonucleotide
  modified_base 1: mod_base = OTHER; note = bicyclic nucleic acid (BNA)
  modified_base 12: mod_base = OTHER; note = bicyclic nucleic acid (BNA)
  modified_base 17: mod_base = OTHER; note = bicyclic nucleic acid (BNA)
  modified_base 8: mod_base = OTHER; note = 5-methyl
  modified_base 12..13: mod_base = OTHER; note = 5-methyl
  modified_base 17..18: mod_base = OTHER; note = 5-methyl
  source 1..18: mol_type = other RNA
gtaagttctgtccaagcc

SEQ ID NO: 11729 - RNA, 18 nt, synthetic construct
  misc_feature 1..18: note = Description of Artificial Sequence: Synthetic Antisense oligonucleotide
  modified_base 1: mod_base = OTHER; note = bicyclic nucleic acid (BNA)
  modified_base 5: mod_base = OTHER; note = bicyclic nucleic acid (BNA)
  modified_base 8: mod_base = OTHER; note = bicyclic nucleic acid (BNA)
  modified_base 8: mod_base = OTHER; note = 5-methyl
  modified_base 12..13: mod_base = OTHER; note = 5-methyl
  modified_base 17..18: mod_base = OTHER; note = 5-methyl
  source 1..18: mol_type = other RNA
gtaagttctgtccaagcc

SEQ ID NO: 11730 - RNA, 18 nt, synthetic construct
  misc_feature 1..18: note = Description of Artificial Sequence: Synthetic Antisense oligonucleotide
  modified_base 1: mod_base = OTHER; note = bicyclic nucleic acid (BNA)
  modified_base 8: mod_base = OTHER; note = bicyclic nucleic acid (BNA)
  modified_base 13: mod_base = OTHER; note = bicyclic nucleic acid (BNA)
  modified_base 8: mod_base = OTHER; note = 5-methyl
  modified_base 12..13: mod_base = OTHER; note = 5-methyl
  modified_base 17..18: mod_base = OTHER; note = 5-methyl
  source 1..18: mol_type = other RNA
gtaagttctgtccaagcc

SEQ ID NO: 11731 - RNA, 18 nt, synthetic construct
  misc_feature 1..18: note = Description of Artificial Sequence: Synthetic Antisense oligonucleotide
  modified_base 1: mod_base = OTHER; note = bicyclic nucleic acid (BNA)
  modified_base 5: mod_base = OTHER; note = bicyclic nucleic acid (BNA)
  modified_base 13: mod_base = OTHER; note = bicyclic nucleic acid (BNA)
  modified_base 8: mod_base = OTHER; note = 5-methyl
  modified_base 12..13: mod_base = OTHER; note = 5-methyl
  modified_base 17..18: mod_base = OTHER; note = 5-methyl
  source 1..18: mol_type = other RNA
gtaagttctgtccaagcc

SEQ ID NO: 11732 - RNA, 18 nt, synthetic construct
  misc_feature 1..18: note = Description of Artificial Sequence: Synthetic Antisense oligonucleotide
  modified_base 1: mod_base = OTHER; note = bicyclic nucleic acid (BNA)
  modified_base 8: mod_base = OTHER; note = bicyclic nucleic acid (BNA)
  modified_base 17: mod_base = OTHER; note = bicyclic nucleic acid (BNA)
  modified_base 8: mod_base = OTHER; note = 5-methyl
  modified_base 12..13: mod_base = OTHER; note = 5-methyl
  modified_base 17..18: mod_base = OTHER; note = 5-methyl
  source 1..18: mol_type = other RNA
gtaagttctgtccaagcc

SEQ ID NO: 11733 - RNA, 18 nt, synthetic construct
  misc_feature 1..18: note = Description of Artificial Sequence: Synthetic Antisense oligonucleotide
  modified_base 1: mod_base = OTHER; note = bicyclic nucleic acid (BNA)
  modified_base 13: mod_base = OTHER; note = bicyclic nucleic acid (BNA)
  modified_base 17: mod_base = OTHER; note = bicyclic nucleic acid (BNA)
  modified_base 8: mod_base = OTHER; note = 5-methyl
  modified_base 12..13: mod_base = OTHER; note = 5-methyl
  modified_base 17..18: mod_base = OTHER; note = 5-methyl
  source 1..18: mol_type = other RNA
gtaagttctgtccaagcc

SEQ ID NO: 11734 - RNA, 18 nt, synthetic construct
  misc_feature 1..18: note = Description of Artificial Sequence: Synthetic Antisense oligonucleotide
  modified_base 1: mod_base = OTHER; note = bicyclic nucleic acid (BNA)
  modified_base 8: mod_base = OTHER; note = bicyclic nucleic acid (BNA)
  modified_base 12: mod_base = OTHER; note = bicyclic nucleic acid (BNA)
  modified_base 8: mod_base = OTHER; note = 5-methyl
  modified_base 12..13: mod_base = OTHER; note = 5-methyl
  modified_base 17..18: mod_base = OTHER; note = 5-methyl
  source 1..18: mol_type = other RNA
gtaagttctgtccaagcc

SEQ ID NO: 11735 - RNA, 18 nt, synthetic construct
  misc_feature 1..18: note = Description of Artificial Sequence: Synthetic Antisense oligonucleotide
  modified_base 1: mod_base = OTHER; note = bicyclic nucleic acid (BNA)
  modified_base 5: mod_base = OTHER; note = bicyclic nucleic acid (BNA)
  modified_base 10: mod_base = OTHER; note = bicyclic nucleic acid (BNA)
  modified_base 8: mod_base = OTHER; note = 5-methyl
  modified_base 12..13: mod_base = OTHER; note = 5-methyl
  modified_base 17..18: mod_base = OTHER; note = 5-methyl
  source 1..18: mol_type = other RNA
gtaagttctgtccaagcc

SEQ ID NO: 11736 - RNA, 18 nt, synthetic construct
  misc_feature 1..18: note = Description of Artificial Sequence: Synthetic Antisense oligonucleotide
  modified_base 1: mod_base = OTHER; note = bicyclic nucleic acid (BNA)
  modified_base 8: mod_base = OTHER; note = bicyclic nucleic acid (BNA)
  modified_base 16: mod_base = OTHER; note = bicyclic nucleic acid (BNA)
  modified_base 8: mod_base = OTHER; note = 5-methyl
  modified_base 12..13: mod_base = OTHER; note = 5-methyl
  modified_base 17..18: mod_base = OTHER; note = 5-methyl
  source 1..18: mol_type = other RNA
gtaagttctgtccaagcc

SEQ ID NO: 11737 - RNA, 18 nt, synthetic construct
  misc_feature 1..18: note = Description of Artificial Sequence: Synthetic Antisense oligonucleotide
  modified_base 1: mod_base = OTHER; note = bicyclic nucleic acid (BNA)
  modified_base 10: mod_base = OTHER; note = bicyclic nucleic acid (BNA)
  modified_base 16: mod_base = OTHER; note = bicyclic nucleic acid (BNA)
  modified_base 8: mod_base = OTHER; note = 5-methyl
  modified_base 12..13: mod_base = OTHER; note = 5-methyl
  modified_base 17..18: mod_base = OTHER; note = 5-methyl
  source 1..18: mol_type = other RNA
gtaagttctgtccaagcc

SEQ ID NO: 11738 - RNA, 18 nt, synthetic construct
  misc_feature 1..18: note = Description of Artificial Sequence: Synthetic Antisense oligonucleotide
  modified_base 1: mod_base = OTHER; note = bicyclic nucleic acid (BNA)
  modified_base 10: mod_base = OTHER; note = bicyclic nucleic acid (BNA)
  modified_base 12: mod_base = OTHER; note = bicyclic nucleic acid (BNA)
  modified_base 8: mod_base = OTHER; note = 5-methyl
  modified_base 12..13: mod_base = OTHER; note = 5-methyl
  modified_base 17..18: mod_base = OTHER; note = 5-methyl
  source 1..18: mol_type = other RNA
gtaagttctgtccaagcc

SEQ ID NO: 11739 - RNA, 18 nt, synthetic construct
  misc_feature 1..18: note = Description of Artificial Sequence: Synthetic Antisense oligonucleotide
  modified_base 1: mod_base = OTHER; note = bicyclic nucleic acid (BNA)
  modified_base 5: mod_base = OTHER; note = bicyclic nucleic acid (BNA)
  modified_base 17: mod_base = OTHER; note = bicyclic nucleic acid (BNA)
  modified_base 8: mod_base = OTHER; note = 5-methyl
  modified_base 12..13: mod_base = OTHER; note = 5-methyl
  modified_base 17..18: mod_base = OTHER; note = 5-methyl
  source 1..18: mol_type = other RNA
gtaagttctgtccaagcc

SEQ ID NO: 11740 - RNA, 18 nt, synthetic construct
  misc_feature 1..18: note = Description of Artificial Sequence: Synthetic Antisense oligonucleotide
  modified_base 1: mod_base = OTHER; note = bicyclic nucleic acid (BNA)
  modified_base 10: mod_base = OTHER; note = bicyclic nucleic acid (BNA)
  modified_base 17: mod_base = OTHER; note = bicyclic nucleic acid (BNA)
  modified_base 8: mod_base = OTHER; note = 5-methyl
  modified_base 12..13: mod_base = OTHER; note = 5-methyl
  modified_base 17..18: mod_base = OTHER; note = 5-methyl
  source 1..18: mol_type = other RNA
gtaagttctgtccaagcc

SEQ ID NO: 11741 - RNA, 18 nt, synthetic construct
  misc_feature 1..18: note = Description of Artificial Sequence: Synthetic Antisense oligonucleotide
  modified_base 1: mod_base = OTHER; note = bicyclic nucleic acid (BNA)
  modified_base 12..13: mod_base = OTHER; note = bicyclic nucleic acid (BNA)
  modified_base 8: mod_base = OTHER; note = 5-methyl
  modified_base 12..13: mod_base = OTHER; note = 5-methyl
  modified_base 17..18: mod_base = OTHER; note = 5-methyl
  source 1..18: mol_type = other RNA
gtaagttctgtccaagcc

SEQ ID NO: 11742 - RNA, 18 nt, synthetic construct
  misc_feature 1..18: note = Description of Artificial Sequence: Synthetic Antisense oligonucleotide
  modified_base 1: mod_base = OTHER; note = bicyclic nucleic acid (BNA)
  modified_base 5: mod_base = OTHER; note = bicyclic nucleic acid (BNA)
  modified_base 12: mod_base = OTHER; note = bicyclic nucleic acid (BNA)
  modified_base 8: mod_base = OTHER; note = 5-methyl
  modified_base 12..13: mod_base = OTHER; note = 5-methyl
  modified_base 17..18: mod_base = OTHER; note = 5-methyl
  source 1..18: mol_type = other RNA
gtaagttctgtccaagcc

SEQ ID NO: 11743 - RNA, 18 nt, synthetic construct
  misc_feature 1..18: note = Description of Artificial Sequence: Synthetic Antisense oligonucleotide
  modified_base 1: mod_base = OTHER; note = bicyclic nucleic acid (BNA)
  modified_base 8: mod_base = OTHER; note = bicyclic nucleic acid (BNA)
  modified_base 10: mod_base = OTHER; note = bicyclic nucleic acid (BNA)
  modified_base 8: mod_base = OTHER; note = 5-methyl
  modified_base 12..13: mod_base = OTHER; note = 5-methyl
  modified_base 17..18: mod_base = OTHER; note = 5-methyl
  source 1..18: mol_type = other RNA
gtaagttctgtccaagcc

SEQ ID NO: 11744 - RNA, 18 nt, synthetic construct
  misc_feature 1..18: note = Description of Artificial Sequence: Synthetic Antisense oligonucleotide
  modified_base 1: mod_base = OTHER; note = bicyclic nucleic acid (BNA)
  modified_base 13: mod_base = OTHER; note = bicyclic nucleic acid (BNA)
  modified_base 16: mod_base = OTHER; note = bicyclic nucleic acid (BNA)
  modified_base 8: mod_base = OTHER; note = 5-methyl
  modified_base 12..13: mod_base = OTHER; note = 5-methyl
  modified_base 17..18: mod_base = OTHER; note = 5-methyl
  source 1..18: mol_type = other RNA
gtaagttctgtccaagcc

SEQ ID NO: 11745 - RNA, 18 nt, synthetic construct
  misc_feature 1..18: note = Description of Artificial Sequence: Synthetic Antisense oligonucleotide
  modified_base 1: mod_base = OTHER; note = bicyclic nucleic acid (BNA)
  modified_base 5: mod_base = OTHER; note = bicyclic nucleic acid (BNA)
  modified_base 16: mod_base = OTHER; note = bicyclic nucleic acid (BNA)
  modified_base 8: mod_base = OTHER; note = 5-methyl
  modified_base 12..13: mod_base = OTHER; note = 5-methyl
  modified_base 17..18: mod_base = OTHER; note = 5-methyl
  source 1..18: mol_type = other RNA
gtaagttctgtccaagcc

SEQ ID NO: 11746 - RNA, 18 nt, synthetic construct
  misc_feature 1..18: note = Description of Artificial Sequence: Synthetic Antisense oligonucleotide
  modified_base 1: mod_base = OTHER; note = bicyclic nucleic acid (BNA)
  modified_base 12: mod_base = OTHER; note = bicyclic nucleic acid (BNA)
  modified_base 16: mod_base = OTHER; note = bicyclic nucleic acid (BNA)
  modified_base 8: mod_base = OTHER; note = 5-methyl
  modified_base 12..13: mod_base = OTHER; note = 5-methyl
  modified_base 17..18: mod_base = OTHER; note = 5-methyl
  source 1..18: mol_type = other RNA
gtaagttctgtccaagcc

SEQ ID NO: 11747 - RNA, 18 nt, synthetic construct
  misc_feature 1..18: note = Description of Artificial Sequence: Synthetic Antisense oligonucleotide
  modified_base 1: mod_base = OTHER; note = bicyclic nucleic acid (BNA)
  modified_base 16..17: mod_base = OTHER; note = bicyclic nucleic acid (BNA)
  modified_base 8: mod_base = OTHER; note = 5-methyl
  modified_base 12..13: mod_base = OTHER; note = 5-methyl
  modified_base 17..18: mod_base = OTHER; note = 5-methyl
  source 1..18: mol_type = other RNA
gtaagttctgtccaagcc

SEQ ID NO: 11748 - RNA, 18 nt, synthetic construct
  misc_feature 1..18: note = Description of Artificial Sequence: Synthetic Antisense oligonucleotide
  modified_base 1: mod_base = OTHER; note = bicyclic nucleic acid (BNA)
  modified_base 10: mod_base = OTHER; note = bicyclic nucleic acid (BNA)
  modified_base 13: mod_base = OTHER; note = bicyclic nucleic acid (BNA)
  modified_base 8: mod_base = OTHER; note = 5-methyl
  modified_base 12..13: mod_base = OTHER; note = 5-methyl
  modified_base 17..18: mod_base = OTHER; note = 5-methyl
  source 1..18: mol_type = other RNA
gtaagttctgtccaagcc

SEQ ID NO: 11749 - RNA, 18 nt, synthetic construct
  misc_feature 1..18: note = Description of Artificial Sequence: Synthetic Antisense oligonucleotide
  modified_base 1: mod_base = OTHER; note = bicyclic nucleic acid (BNA)
  modified_base 6: mod_base = OTHER; note = bicyclic nucleic acid (BNA)
  modified_base 10: mod_base = OTHER; note = bicyclic nucleic acid (BNA)
  modified_base 4: mod_base = OTHER; note = 5-methyl
  modified_base 13: mod_base = OTHER; note = 5-methyl
  modified_base 17..18: mod_base = OTHER; note = 5-methyl
  source 1..18: mol_type = other RNA
agtcggtaagttctgtcc

SEQ ID NO: 11750 - RNA, 18 nt, synthetic construct
  misc_feature 1..18: note = Description of Artificial Sequence: Synthetic Antisense oligonucleotide
  modified_base 1: mod_base = OTHER; note = bicyclic nucleic acid (BNA)
  modified_base 5: mod_base = OTHER; note = bicyclic nucleic acid (BNA)
  modified_base 13: mod_base = OTHER; note = bicyclic nucleic acid (BNA)
  modified_base 4: mod_base = OTHER; note = 5-methyl
  modified_base 13: mod_base = OTHER; note = 5-methyl
  modified_base 17..18: mod_base = OTHER; note = 5-methyl
  source 1..18: mol_type = other RNA
agtcggtaagttctgtcc

SEQ ID NO: 11751 - RNA, 18 nt, synthetic construct
  misc_feature 1..18: note = Description of Artificial Sequence: Synthetic Antisense oligonucleotide
  modified_base 1: mod_base = OTHER; note = bicyclic nucleic acid (BNA)
  modified_base 13: mod_base = OTHER; note = bicyclic nucleic acid (BNA)
  modified_base 17: mod_base = OTHER; note = bicyclic nucleic acid (BNA)
  modified_base 4: mod_base = OTHER; note = 5-methyl
  modified_base 13: mod_base = OTHER; note = 5-methyl
  modified_base 17..18: mod_base = OTHER; note = 5-methyl
  source 1..18: mol_type = other RNA
agtcggtaagttctgtcc

SEQ ID NO: 11752 - RNA, 18 nt, synthetic construct
  misc_feature 1..18: note = Description of Artificial Sequence: Synthetic Antisense oligonucleotide
  modified_base 1: mod_base = OTHER; note = bicyclic nucleic acid (BNA)
  modified_base 4: mod_base = OTHER; note = bicyclic nucleic acid (BNA)
  modified_base 15: mod_base = OTHER; note = bicyclic nucleic acid (BNA)
  modified_base 4: mod_base = OTHER; note = 5-methyl
  modified_base 13: mod_base = OTHER; note = 5-methyl
  modified_base 17..18: mod_base = OTHER; note = 5-methyl
  source 1..18: mol_type = other RNA
agtcggtaagttctgtcc

SEQ ID NO: 11753 - RNA, 18 nt, synthetic construct
  misc_feature 1..18: note = Description of Artificial Sequence: Synthetic Antisense oligonucleotide
  modified_base 1: mod_base = OTHER; note = bicyclic nucleic acid (BNA)
  modified_base 5: mod_base = OTHER; note = bicyclic nucleic acid (BNA)
  modified_base 10: mod_base = OTHER; note = bicyclic nucleic acid (BNA)
  modified_base 4: mod_base = OTHER; note = 5-methyl
  modified_base 13: mod_base = OTHER; note = 5-methyl
  modified_base 17..18: mod_base = OTHER; note = 5-methyl
  source 1..18: mol_type = other RNA
agtcggtaagttctgtcc

SEQ ID NO: 11754 - RNA, 18 nt, synthetic construct
  misc_feature 1..18: note = Description of Artificial Sequence: Synthetic Antisense oligonucleotide
  modified_base 1: mod_base = OTHER; note = bicyclic nucleic acid (BNA)
  modified_base 6: mod_base = OTHER; note = bicyclic nucleic acid (BNA)
  modified_base 13: mod_base = OTHER; note = bicyclic nucleic acid (BNA)
  modified_base 4: mod_base = OTHER; note = 5-methyl
  modified_base 13: mod_base = OTHER; note = 5-methyl
  modified_base 17..18: mod_base = OTHER; note = 5-methyl
  source 1..18: mol_type = other RNA
agtcggtaagttctgtcc

SEQ ID NO: 11755 - RNA, 18 nt, synthetic construct
  misc_feature 1..18: note = Description of Artificial Sequence: Synthetic Antisense oligonucleotide
  modified_base 1: mod_base = OTHER; note = bicyclic nucleic acid (BNA)
  modified_base 4: mod_base = OTHER; note = bicyclic nucleic acid (BNA)
  modified_base 17: mod_base = OTHER; note = bicyclic nucleic acid (BNA)
  modified_base 4: mod_base = OTHER; note = 5-methyl
  modified_base 13: mod_base = OTHER; note = 5-methyl
  modified_base 17..18: mod_base = OTHER; note = 5-methyl
  source 1..18: mol_type = other RNA
agtcggtaagttctgtcc

SEQ ID NO: 11756 - RNA, 18 nt, synthetic construct
  misc_feature 1..18: note = Description of Artificial Sequence: Synthetic Antisense oligonucleotide
  modified_base 1: mod_base = OTHER; note = bicyclic nucleic acid (BNA)
  modified_base 10: mod_base = OTHER; note = bicyclic nucleic acid (BNA)
  modified_base 15: mod_base = OTHER; note = bicyclic nucleic acid (BNA)
  modified_base 4: mod_base = OTHER; note = 5-methyl
  modified_base 13: mod_base = OTHER; note = 5-methyl
  modified_base 17..18: mod_base = OTHER; note = 5-methyl
  source 1..18: mol_type = other RNA
agtcggtaagttctgtcc

SEQ ID NO: 11757 - RNA, 18 nt, synthetic construct
  misc_feature 1..18: note = Description of Artificial Sequence: Synthetic Antisense oligonucleotide
  modified_base 1: mod_base = OTHER; note = bicyclic nucleic acid (BNA)
  modified_base 13: mod_base = OTHER; note = bicyclic nucleic acid (BNA)
  modified_base 15: mod_base = OTHER; note = bicyclic nucleic acid (BNA)
  modified_base 4: mod_base = OTHER; note = 5-methyl
  modified_base 13: mod_base = OTHER; note = 5-methyl
  modified_base 17..18: mod_base = OTHER; note = 5-methyl
  source 1..18: mol_type = other RNA
agtcggtaagttctgtcc

SEQ ID NO: 11758 - RNA, 18 nt, synthetic construct
  misc_feature 1..18: note = Description of Artificial Sequence: Synthetic Antisense oligonucleotide
  modified_base 1: mod_base = OTHER; note = bicyclic nucleic acid (BNA)
  modified_base 5..6: mod_base = OTHER; note = bicyclic nucleic acid (BNA)
  modified_base 4: mod_base = OTHER; note = 5-methyl
  modified_base 13: mod_base = OTHER; note = 5-methyl
  modified_base 17..18: mod_base = OTHER; note = 5-methyl
  source 1..18: mol_type = other RNA
agtcggtaagttctgtcc

SEQ ID NO: 11759 - RNA, 18 nt, synthetic construct
  misc_feature 1..18: note = Description of Artificial Sequence: Synthetic Antisense oligonucleotide
  modified_base 1: mod_base = OTHER; note = bicyclic nucleic acid (BNA)
  modified_base 5: mod_base = OTHER; note = bicyclic nucleic acid (BNA)
  modified_base 15: mod_base = OTHER; note = bicyclic nucleic acid (BNA)
  modified_base 4: mod_base = OTHER; note = 5-methyl
  modified_base 13: mod_base = OTHER; note = 5-methyl
  modified_base 17..18: mod_base = OTHER; note = 5-methyl
  source 1..18: mol_type = other RNA
agtcggtaagttctgtcc

SEQ ID NO: 11760 - RNA, 18 nt, synthetic construct
  misc_feature 1..18: note = Description of Artificial Sequence: Synthetic Antisense oligonucleotide
  modified_base 1: mod_base = OTHER; note = bicyclic nucleic acid (BNA)
  modified_base 5: mod_base = OTHER; note = bicyclic nucleic acid (BNA)
  modified_base 17: mod_base = OTHER; note = bicyclic nucleic acid (BNA)
  modified_base 4: mod_base = OTHER; note = 5-methyl
  modified_base 13: mod_base = OTHER; note = 5-methyl
  modified_base 17..18: mod_base = OTHER; note = 5-methyl
  source 1..18: mol_type = other RNA
agtcggtaagttctgtcc

SEQ ID NO: 11761 - RNA, 18 nt, synthetic construct
  misc_feature 1..18: note = Description of Artificial Sequence: Synthetic Antisense oligonucleotide
  modified_base 1: mod_base = OTHER; note = bicyclic nucleic acid (BNA)
  modified_base 10: mod_base = OTHER; note = bicyclic nucleic acid (BNA)
  modified_base 17: mod_base = OTHER; note = bicyclic nucleic acid (BNA)
  modified_base 4: mod_base = OTHER; note = 5-methyl
  modified_base 13: mod_base = OTHER; note = 5-methyl
  modified_base 17..18: mod_base = OTHER; note = 5-methyl
  source 1..18: mol_type = other RNA
agtcggtaagttctgtcc

SEQ ID NO: 11762 - RNA, 18 nt, synthetic construct
  misc_feature 1..18: note = Description of Artificial Sequence: Synthetic Antisense oligonucleotide
  modified_base 1: mod_base = OTHER; note = bicyclic nucleic acid (BNA)
  modified_base 4: mod_base = OTHER; note = bicyclic nucleic acid (BNA)
  modified_base 10: mod_base = OTHER; note = bicyclic nucleic acid (BNA)
  modified_base 4: mod_base = OTHER; note = 5-methyl
  modified_base 13: mod_base = OTHER; note = 5-methyl
  modified_base 17..18: mod_base = OTHER; note = 5-methyl
  source 1..18: mol_type = other RNA
agtcggtaagttctgtcc

SEQ ID NO: 11763 - RNA, 18 nt, synthetic construct
  misc_feature 1..18: note = Description of Artificial Sequence: Synthetic Antisense oligonucleotide
  modified_base 1: mod_base = OTHER; note = bicyclic nucleic acid (BNA)
  modified_base 4: mod_base = OTHER; note = bicyclic nucleic acid (BNA)
  modified_base 6: mod_base = OTHER; note = bicyclic nucleic acid (BNA)
  modified_base 4: mod_base = OTHER; note = 5-methyl
  modified_base 13: mod_base = OTHER; note = 5-methyl
  modified_base 17..18: mod_base = OTHER; note = 5-methyl
  source 1..18: mol_type = other RNA
agtcggtaagttctgtcc

SEQ ID NO: 11764 - RNA, 18 nt, synthetic construct
  misc_feature 1..18: note = Description of Artificial Sequence: Synthetic Antisense oligonucleotide
  modified_base 1: mod_base = OTHER; note = bicyclic nucleic acid (BNA)
  modified_base 4: mod_base = OTHER; note = bicyclic nucleic acid (BNA)
  modified_base 13: mod_base = OTHER; note = bicyclic nucleic acid (BNA)
  modified_base 4: mod_base = OTHER; note = 5-methyl
  modified_base 13: mod_base = OTHER; note = 5-methyl
  modified_base 17..18: mod_base = OTHER; note = 5-methyl
  source 1..18: mol_type = other RNA
agtcggtaagttctgtcc

SEQ ID NO: 11765 - RNA, 18 nt, synthetic construct
  misc_feature 1..18: note = Description of Artificial Sequence: Synthetic Antisense oligonucleotide
  modified_base 1: mod_base = OTHER; note = bicyclic nucleic acid (BNA)
  modified_base 15: mod_base = OTHER; note = bicyclic nucleic acid (BNA)
  modified_base 17: mod_base = OTHER; note = bicyclic nucleic acid (BNA)
  modified_base 4: mod_base = OTHER; note = 5-methyl
  modified_base 13: mod_base = OTHER; note = 5-methyl
  modified_base 17..18: mod_base = OTHER; note = 5-methyl
  source 1..18: mol_type = other RNA
agtcggtaagttctgtcc

SEQ ID NO: 11766 - RNA, 18 nt, synthetic construct
  misc_feature 1..18: note = Description of Artificial Sequence: Synthetic Antisense oligonucleotide
  modified_base 1: mod_base = OTHER; note = bicyclic nucleic acid (BNA)
  modified_base 6: mod_base = OTHER; note = bicyclic nucleic acid (BNA)
  modified_base 17: mod_base = OTHER; note = bicyclic nucleic acid (BNA)
  modified_base 4: mod_base = OTHER; note = 5-methyl
  modified_base 13: mod_base = OTHER; note = 5-methyl
  modified_base 17..18: mod_base = OTHER; note = 5-methyl
  source 1..18: mol_type = other RNA
agtcggtaagttctgtcc

SEQ ID NO: 11767 - RNA, 18 nt, synthetic construct
  misc_feature 1..18: note = Description of Artificial Sequence: Synthetic Antisense oligonucleotide
  modified_base 1: mod_base = OTHER; note = bicyclic nucleic acid (BNA)
  modified_base 6: mod_base = OTHER; note = bicyclic nucleic acid (BNA)
  modified_base 15: mod_base = OTHER; note = bicyclic nucleic acid (BNA)
  modified_base 4: mod_base = OTHER; note = 5-methyl
  modified_base 13: mod_base = OTHER; note = 5-methyl
  modified_base 17..18: mod_base = OTHER; note = 5-methyl
  source 1..18: mol_type = other RNA
agtcggtaagttctgtcc

SEQ ID NO: 11768 - RNA, 18 nt, synthetic construct
  misc_feature 1..18: note = Description of Artificial Sequence: Synthetic Antisense oligonucleotide
  modified_base 1: mod_base = OTHER; note = bicyclic nucleic acid (BNA)
  modified_base 4..5: mod_base = OTHER; note = bicyclic nucleic acid (BNA)
  modified_base 4: mod_base = OTHER; note = 5-methyl
  modified_base 13: mod_base = OTHER; note = 5-methyl
  modified_base 17..18: mod_base = OTHER; note = 5-methyl
  source 1..18: mol_type = other RNA
agtcggtaagttctgtcc

SEQ ID NO: 11769 - RNA, 18 nt, synthetic construct
  misc_feature 1..18: note = Description of Artificial Sequence: Synthetic Antisense oligonucleotide
  modified_base 1: mod_base = OTHER; note = bicyclic nucleic acid (BNA)
  modified_base 10: mod_base = OTHER; note = bicyclic nucleic acid (BNA)
  modified_base 13: mod_base = OTHER; note = bicyclic nucleic acid (BNA)
  modified_base 4: mod_base = OTHER; note = 5-methyl
  modified_base 13: mod_base = OTHER; note = 5-methyl
  modified_base 17..18: mod_base = OTHER; note = 5-methyl
  source 1..18: mol_type = other RNA
agtcggtaagttctgtcc

SEQ ID NO: 11770 - RNA, 18 nt, synthetic construct
  misc_feature 1..18: note = Description of Artificial Sequence: Synthetic Antisense oligonucleotide
  modified_base 1: mod_base = OTHER; note = 5-methyl
  modified_base 5..6: mod_base = OTHER; note = 5-methyl
  modified_base 10..12: mod_base = OTHER; note = 5-methyl
  modified_base 1: mod_base = OTHER; note = bicyclic nucleic acid (BNA)
  modified_base 12: mod_base = OTHER; note = bicyclic nucleic acid (BNA)
  modified_base 17: mod_base = OTHER; note = bicyclic nucleic acid (BNA)
  source 1..18: mol_type = other RNA
ctgtccaagcccggttga

SEQ ID NO: 11771 - RNA, 18 nt, synthetic construct
  misc_feature 1..18: note = Description of Artificial Sequence: Synthetic Antisense oligonucleotide
  modified_base 1: mod_base = OTHER; note = 5-methyl
  modified_base 5..6: mod_base = OTHER; note = 5-methyl
  modified_base 10..12: mod_base = OTHER; note = 5-methyl
  modified_base 1: mod_base = OTHER; note = bicyclic nucleic acid (BNA)
  modified_base 6: mod_base = OTHER; note = bicyclic nucleic acid (BNA)
  modified_base 10: mod_base = OTHER; note = bicyclic nucleic acid (BNA)
  source 1..18: mol_type = other RNA
ctgtccaagcccggttga

SEQ ID NO: 11772 - RNA, 18 nt, synthetic construct
  misc_feature 1..18: note = Description of Artificial Sequence: Synthetic Antisense oligonucleotide
  modified_base 1: mod_base = OTHER; note = 5-methyl
  modified_base 5..6: mod_base = OTHER; note = 5-methyl
  modified_base 10..12: mod_base = OTHER; note = 5-methyl
  modified_base 1: mod_base = OTHER; note = bicyclic nucleic acid (BNA)
  modified_base 9: mod_base = OTHER; note = bicyclic nucleic acid (BNA)
  modified_base 14: mod_base = OTHER; note = bicyclic nucleic acid (BNA)
  source 1..18: mol_type = other RNA
ctgtccaagcccggttga

SEQ ID NO: 11773 - RNA, 18 nt, synthetic construct
  misc_feature 1..18: note = Description of Artificial Sequence: Synthetic Antisense oligonucleotide
  modified_base 1: mod_base = OTHER; note = 5-methyl
  modified_base 5..6: mod_base = OTHER; note = 5-methyl
  modified_base 10..12: mod_base = OTHER; note = 5-methyl
  modified_base 1: mod_base = OTHER; note = bicyclic nucleic acid (BNA)
  modified_base 11..12: mod_base = OTHER; note = bicyclic nucleic acid (BNA)
  source 1..18: mol_type = other RNA
ctgtccaagcccggttga

SEQ ID NO: 11774 - RNA, 18 nt, synthetic construct
  misc_feature 1..18: note = Description of Artificial Sequence: Synthetic Antisense oligonucleotide
  modified_base 1: mod_base = OTHER; note = 5-methyl
  modified_base 5..6: mod_base = OTHER; note = 5-methyl
  modified_base 10..12: mod_base = OTHER; note = 5-methyl
  modified_base 1: mod_base = OTHER; note = bicyclic nucleic acid (BNA)
  modified_base 5: mod_base = OTHER; note = bicyclic nucleic acid (BNA)
  modified_base 9: mod_base = OTHER; note = bicyclic nucleic acid (BNA)
  source 1..18: mol_type = other RNA
ctgtccaagcccggttga

SEQ ID NO: 11775 - RNA, 18 nt, synthetic construct
  misc_feature 1..18: note = Description of Artificial Sequence: Synthetic Antisense oligonucleotide
  modified_base 1: mod_base = OTHER; note = 5-methyl
  modified_base 5..6: mod_base = OTHER; note = 5-methyl
  modified_base 10..12: mod_base = OTHER; note = 5-methyl
  modified_base 1: mod_base = OTHER; note = bicyclic nucleic acid (BNA)
  modified_base 3: mod_base = OTHER; note = bicyclic nucleic acid (BNA)
  modified_base 9: mod_base = OTHER; note = bicyclic nucleic acid (BNA)
  source 1..18: mol_type = other RNA
ctgtccaagcccggttga

SEQ ID NO: 11776 - RNA, 18 nt, synthetic construct
  misc_feature 1..18: note = Description of Artificial Sequence: Synthetic Antisense oligonucleotide
  modified_base 1: mod_base = OTHER; note = 5-methyl
  modified_base 5..6: mod_base = OTHER; note = 5-methyl
  modified_base 10..12: mod_base = OTHER; note = 5-methyl
  modified_base 1: mod_base = OTHER; note = bicyclic nucleic acid (BNA)
  modified_base 6: mod_base = OTHER; note = bicyclic nucleic acid (BNA)
  modified_base 14: mod_base = OTHER; note = bicyclic nucleic acid (BNA)
  source 1..18: mol_type = other RNA
ctgtccaagcccggttga

SEQ ID NO: 11777 - RNA, 18 nt, synthetic construct
  misc_feature 1..18: note = Description of Artificial Sequence: Synthetic Antisense oligonucleotide
  modified_base 1: mod_base = OTHER; note = 5-methyl
  modified_base 5..6: mod_base = OTHER; note = 5-methyl
  modified_base 10..12: mod_base = OTHER; note = 5-methyl
  modified_base 1: mod_base = OTHER; note = bicyclic nucleic acid (BNA)
  modified_base 9..10: mod_base = OTHER; note = bicyclic nucleic acid (BNA)
  source 1..18: mol_type = other RNA
ctgtccaagcccggttga

SEQ ID NO: 11778 - RNA, 18 nt, synthetic construct
  misc_feature 1..18: note = Description of Artificial Sequence: Synthetic Antisense oligonucleotide
  modified_base 1: mod_base = OTHER; note = 5-methyl
  modified_base 5..6: mod_base = OTHER; note = 5-methyl
  modified_base 10..12: mod_base = OTHER; note = 5-methyl
  modified_base 1: mod_base = OTHER; note = bicyclic nucleic acid (BNA)
  modified_base 5: mod_base = OTHER; note = bicyclic nucleic acid (BNA)
  modified_base 13: mod_base = OTHER; note = bicyclic nucleic acid (BNA)
  source 1..18: mol_type = other RNA
ctgtccaagcccggttga

SEQ ID NO: 11779 - RNA, 18 nt, synthetic construct
  misc_feature 1..18: note = Description of Artificial Sequence: Synthetic Antisense oligonucleotide
  modified_base 1: mod_base = OTHER; note = 5-methyl
  modified_base 5..6: mod_base = OTHER; note = 5-methyl
  modified_base 10..12: mod_base = OTHER; note = 5-methyl
  modified_base 1: mod_base = OTHER; note = bicyclic nucleic acid (BNA)
  modified_base 3: mod_base = OTHER; note = bicyclic nucleic acid (BNA)
  modified_base 13: mod_base = OTHER; note = bicyclic nucleic acid (BNA)
  source 1..18: mol_type = other RNA
ctgtccaagcccggttga

SEQ ID NO: 11780 - RNA, 18 nt, synthetic construct
  misc_feature 1..18: note = Description of Artificial Sequence: Synthetic Antisense oligonucleotide
  modified_base 1: mod_base = OTHER; note = 5-methyl
  modified_base 5..6: mod_base = OTHER; note = 5-methyl
  modified_base 10..12: mod_base = OTHER; note = 5-methyl
  modified_base 1: mod_base = OTHER; note = bicyclic nucleic acid (BNA)
  modified_base 13: mod_base = OTHER; note = bicyclic nucleic acid (BNA)
  modified_base 17: mod_base = OTHER; note = bicyclic nucleic acid (BNA)
  source 1..18: mol_type = other RNA
ctgtccaagcccggttga

SEQ ID NO: 11781 - RNA, 18 nt, synthetic construct
  misc_feature 1..18: note = Description of Artificial Sequence: Synthetic Antisense oligonucleotide
  modified_base 1: mod_base = OTHER; note = 5-methyl
  modified_base 5..6: mod_base = OTHER; note = 5-methyl
  modified_base 10..12: mod_base = OTHER; note = 5-methyl
  modified_base 1: mod_base = OTHER; note = bicyclic nucleic acid (BNA)
  modified_base 3: mod_base = OTHER; note = bicyclic nucleic acid (BNA)
  modified_base 6: mod_base = OTHER; note = bicyclic nucleic acid (BNA)
  source 1..18: mol_type = other RNA
ctgtccaagcccggttga

SEQ ID NO: 11782 - RNA, 18 nt, synthetic construct
  misc_feature 1..18: note = Description of Artificial Sequence: Synthetic Antisense oligonucleotide
  modified_base 1: mod_base = OTHER; note = 5-methyl
  modified_base 5..6: mod_base = OTHER; note = 5-methyl
  modified_base 10..12: mod_base = OTHER; note = 5-methyl
  modified_base 1: mod_base = OTHER; note = bicyclic nucleic acid (BNA)
  modified_base 6: mod_base = OTHER; note = bicyclic nucleic acid (BNA)
  modified_base 9: mod_base = OTHER; note = bicyclic nucleic acid (BNA)
  source 1..18: mol_type = other RNA
ctgtccaagcccggttga

SEQ ID NO: 11783 - RNA, 18 nt, synthetic construct
  misc_feature 1..18: note = Description of Artificial Sequence: Synthetic Antisense oligonucleotide
  modified_base 1: mod_base = OTHER; note = 5-methyl
  modified_base 5..6: mod_base = OTHER; note = 5-methyl
  modified_base 10..12: mod_base = OTHER; note = 5-methyl
  modified_base 1: mod_base = OTHER; note = bicyclic nucleic acid (BNA)
  modified_base 5: mod_base = OTHER; note = bicyclic nucleic acid (BNA)
  modified_base 10: mod_base = OTHER; note = bicyclic nucleic acid (BNA)
  source 1..18: mol_type = other RNA
ctgtccaagcccggttga

SEQ ID NO: 11784 - RNA, 18 nt, synthetic construct
  misc_feature 1..18: note = Description of Artificial Sequence: Synthetic Antisense oligonucleotide
  modified_base 1: mod_base = OTHER; note = 5-methyl
  modified_base 5..6: mod_base = OTHER; note = 5-methyl
  modified_base 10..12: mod_base = OTHER; note = 5-methyl
  modified_base 1: mod_base = OTHER; note = bicyclic nucleic acid (BNA)
  modified_base 3: mod_base = OTHER; note = bicyclic nucleic acid (BNA)
  modified_base 10: mod_base = OTHER; note = bicyclic nucleic acid (BNA)
  source 1..18: mol_type = other RNA
ctgtccaagcccggttga

SEQ ID NO: 11785 - RNA, 18 nt, synthetic construct
  misc_feature 1..18: note = Description of Artificial Sequence: Synthetic Antisense oligonucleotide
  modified_base 1: mod_base = OTHER; note = 5-methyl
  modified_base 5..6: mod_base = OTHER; note = 5-methyl
  modified_base 10..12: mod_base = OTHER; note = 5-methyl
  modified_base 1: mod_base = OTHER; note = bicyclic nucleic acid (BNA)
  modified_base 13..14: mod_base = OTHER; note = bicyclic nucleic acid (BNA)
  source 1..18: mol_type = other RNA
ctgtccaagcccggttga

SEQ ID NO: 11786 - RNA, 18 nt, synthetic construct
  misc_feature 1..18: note = Description of Artificial Sequence: Synthetic Antisense oligonucleotide
  modified_base 1: mod_base = OTHER; note = 5-methyl
  modified_base 5..6: mod_base = OTHER; note = 5-methyl
  modified_base 10..12: mod_base = OTHER; note = 5-methyl
  modified_base 1: mod_base = OTHER; note = bicyclic nucleic acid (BNA)
  modified_base 6: mod_base = OTHER; note = bicyclic nucleic acid (BNA)
  modified_base 13: mod_base = OTHER; note = bicyclic nucleic acid (BNA)
  source 1..18: mol_type = other RNA
ctgtccaagcccggttga

SEQ ID NO: 11787 - RNA, 18 nt, synthetic construct
  misc_feature 1..18: note = Description of Artificial Sequence: Synthetic Antisense oligonucleotide
  modified_base 1: mod_base = OTHER; note = 5-methyl
  modified_base 5..6: mod_base = OTHER; note = 5-methyl
  modified_base 10..12: mod_base = OTHER; note = 5-methyl
  modified_base 1: mod_base = OTHER; note = bicyclic nucleic acid (BNA)
  modified_base 9: mod_base = OTHER; note = bicyclic nucleic acid (BNA)
  modified_base 11: mod_base = OTHER; note = bicyclic nucleic acid (BNA)
  source 1..18: mol_type = other RNA
ctgtccaagcccggttga

SEQ ID NO: 11788 - RNA, 18 nt, synthetic construct
  misc_feature 1..18: note = Description of Artificial Sequence: Synthetic Antisense oligonucleotide
  modified_base 1: mod_base = OTHER; note = 5-methyl
  modified_base 5..6: mod_base = OTHER; note = 5-methyl
  modified_base 10..12: mod_base = OTHER; note = 5-methyl
  modified_base 1: mod_base = OTHER; note = bicyclic nucleic acid (BNA)
  modified_base 14: mod_base = OTHER; note = bicyclic nucleic acid (BNA)
  modified_base 17: mod_base = OTHER; note = bicyclic nucleic acid (BNA)
  source 1..18: mol_type = other RNA
ctgtccaagcccggttga

SEQ ID NO: 11789 - RNA, 18 nt, synthetic construct
  misc_feature 1..18: note = Description of Artificial Sequence: Synthetic Antisense oligonucleotide
  modified_base 1: mod_base = OTHER; note = 5-methyl
  modified_base 5..6: mod_base = OTHER; note = 5-methyl
  modified_base 10..12: mod_base = OTHER; note = 5-methyl
  modified_base 1: mod_base = OTHER; note = bicyclic nucleic acid (BNA)
  modified_base 11: mod_base = OTHER; note = bicyclic nucleic acid (BNA)
  modified_base 13: mod_base = OTHER; note = bicyclic nucleic acid (BNA)
  source 1..18: mol_type = other RNA
ctgtccaagcccggttga

SEQ ID NO: 11790 - RNA, 18 nt, synthetic construct
  misc_feature 1..18: note = Description of Artificial Sequence: Synthetic Antisense oligonucleotide
  modified_base 1: mod_base = OTHER; note = 5-methyl
  modified_base 5..6: mod_base = OTHER; note = 5-methyl
  modified_base 10..12: mod_base = OTHER; note = 5-methyl
  modified_base 1: mod_base = OTHER; note = bicyclic nucleic acid (BNA)
  modified_base 5: mod_base = OTHER; note = bicyclic nucleic acid (BNA)
  modified_base 14: mod_base = OTHER; note = bicyclic nucleic acid (BNA)
  source 1..18: mol_type = other RNA
ctgtccaagcccggttga

SEQ ID NO: 11791 - RNA, 18 nt, synthetic construct
  misc_feature 1..18: note = Description of Artificial Sequence: Synthetic Antisense oligonucleotide
  modified_base 1: mod_base = OTHER; note = 5-methyl
  modified_base 5..6: mod_base = OTHER; note = 5-methyl
  modified_base 10..12: mod_base = OTHER; note = 5-methyl
  modified_base 1: mod_base = OTHER; note = bicyclic nucleic acid (BNA)
  modified_base 3: mod_base = OTHER; note = bicyclic nucleic acid (BNA)
  modified_base 14: mod_base = OTHER; note = bicyclic nucleic acid (BNA)
  source 1..18: mol_type = other RNA
ctgtccaagcccggttga

SEQ ID NO: 11792 - RNA, 18 nt, synthetic construct
  misc_feature 1..18: note = Description of Artificial Sequence: Synthetic Antisense oligonucleotide
  modified_base 1: mod_base = OTHER; note = 5-methyl
  modified_base 5..6: mod_base = OTHER; note = 5-methyl
  modified_base 10..12: mod_base = OTHER; note = 5-methyl
  modified_base 1: mod_base = OTHER; note = bicyclic nucleic acid (BNA)
  modified_base 10: mod_base = OTHER; note = bicyclic nucleic acid (BNA)
  modified_base 12: mod_base = OTHER; note = bicyclic nucleic acid (BNA)
  source 1..18: mol_type = other RNA
ctgtccaagcccggttga

SEQ ID NO: 11793 - RNA, 18 nt, synthetic construct
  misc_feature 1..18: note = Description of Artificial Sequence: Synthetic Antisense oligonucleotide
  modified_base 1: mod_base = OTHER; note = 5-methyl
  modified_base 5..6: mod_base = OTHER; note = 5-methyl
  modified_base 10..12: mod_base = OTHER; note = 5-methyl
  modified_base 1: mod_base = OTHER; note = bicyclic nucleic acid (BNA)
  modified_base 9: mod_base = OTHER; note = bicyclic nucleic acid (BNA)
  modified_base 17: mod_base = OTHER; note = bicyclic nucleic acid (BNA)
  source 1..18: mol_type = other RNA
ctgtccaagcccggttga

SEQ ID NO: 11794 - RNA, 18 nt, synthetic construct
  misc_feature 1..18: note = Description of Artificial Sequence: Synthetic Antisense oligonucleotide
  modified_base 1: mod_base = OTHER; note = 5-methyl
  modified_base 5..6: mod_base = OTHER; note = 5-methyl
  modified_base 10..12: mod_base = OTHER; note = 5-methyl
  modified_base 1: mod_base = OTHER; note = bicyclic nucleic acid (BNA)
  modified_base 12: mod_base = OTHER; note = bicyclic nucleic acid (BNA)
  modified_base 14: mod_base = OTHER; note = bicyclic nucleic acid (BNA)
  source 1..18: mol_type = other RNA
ctgtccaagcccggttga

SEQ ID NO: 11795 - RNA, 18 nt, synthetic construct
  misc_feature 1..18: note = Description of Artificial Sequence: Synthetic Antisense oligonucleotide
  modified_base 1: mod_base = OTHER; note = 5-methyl
  modified_base 5..6: mod_base = OTHER; note = 5-methyl
  modified_base 10..12: mod_base = OTHER; note = 5-methyl
  modified_base 1: mod_base = OTHER; note = bicyclic nucleic acid (BNA)
  modified_base 5: mod_base = OTHER; note = bicyclic nucleic acid (BNA)
  modified_base 11: mod_base = OTHER; note = bicyclic nucleic acid (BNA)
  source 1..18: mol_type = other RNA
ctgtccaagcccggttga

SEQ ID NO: 11796 - RNA, 18 nt, synthetic construct
  misc_feature 1..18: note = Description of Artificial Sequence: Synthetic Antisense oligonucleotide
  modified_base 1: mod_base = OTHER; note = 5-methyl
  modified_base 5..6: mod_base = OTHER; note = 5-methyl
  modified_base 10..12: mod_base = OTHER; note = 5-methyl
  modified_base 1: mod_base = OTHER; note = bicyclic nucleic acid (BNA)
  modified_base 3: mod_base = OTHER; note = bicyclic nucleic acid (BNA)
  modified_base 17: mod_base = OTHER; note = bicyclic nucleic acid (BNA)
  source 1..18: mol_type = other RNA
ctgtccaagcccggttga

SEQ ID NO: 11797 - RNA, 18 nt, synthetic construct
  misc_feature 1..18: note = Description of Artificial Sequence: Synthetic Antisense oligonucleotide
  modified_base 1: mod_base = OTHER; note = 5-methyl
  modified_base 5..6: mod_base = OTHER; note = 5-methyl
  modified_base 10..12: mod_base = OTHER; note = 5-methyl
  modified_base 1: mod_base = OTHER; note = bicyclic nucleic acid (BNA)
  modified_base 6: mod_base = OTHER; note = bicyclic nucleic acid (BNA)
  modified_base 12: mod_base = OTHER; note = bicyclic nucleic acid (BNA)
  source 1..18: mol_type = other RNA
ctgtccaagcccggttga

SEQ ID NO: 11798 - RNA, 18 nt, synthetic construct
  misc_feature 1..18: note = Description of Artificial Sequence: Synthetic Antisense oligonucleotide
  modified_base 1: mod_base = OTHER; note = 5-methyl
  modified_base 5..6: mod_base = OTHER; note = 5-methyl
  modified_base 10..12: mod_base = OTHER; note = 5-methyl
  modified_base 1: mod_base = OTHER; note = bicyclic nucleic acid (BNA)
  modified_base 5..6: mod_base = OTHER; note = bicyclic nucleic acid (BNA)
  source 1..18: mol_type = other RNA
ctgtccaagcccggttga

SEQ ID NO: 11799 - RNA, 18 nt, synthetic construct
  misc_feature 1..18: note = Description of Artificial Sequence: Synthetic Antisense oligonucleotide
  modified_base 1: mod_base = OTHER; note = 5-methyl
  modified_base 5..6: mod_base = OTHER; note = 5-methyl
  modified_base 10..12: mod_base = OTHER; note = 5-methyl
  modified_base 1: mod_base = OTHER; note = bicyclic nucleic acid (BNA)
  modified_base 11: mod_base = OTHER; note = bicyclic nucleic acid (BNA)
  modified_base 14: mod_base = OTHER; note = bicyclic nucleic acid (BNA)
  source 1..18: mol_type = other RNA
ctgtccaagcccggttga

SEQ ID NO: 11800 - RNA, 18 nt, synthetic construct
  misc_feature 1..18: note = Description of Artificial Sequence: Synthetic Antisense oligonucleotide
  modified_base 1: mod_base = OTHER; note = 5-methyl
  modified_base 5..6: mod_base = OTHER; note = 5-methyl
  modified_base 10..12: mod_base = OTHER; note = 5-methyl
  modified_base 1: mod_base = OTHER; note = bicyclic nucleic acid (BNA)
  modified_base 9: mod_base = OTHER; note = bicyclic nucleic acid (BNA)
  modified_base 12: mod_base = OTHER; note = bicyclic nucleic acid (BNA)
  source 1..18: mol_type = other RNA
ctgtccaagcccggttga

SEQ ID NO: 11801 - RNA, 18 nt, synthetic construct
  misc_feature 1..18: note = Description of Artificial Sequence: Synthetic Antisense oligonucleotide
  modified_base 1: mod_base = OTHER; note = 5-methyl
  modified_base 5..6: mod_base = OTHER; note = 5-methyl
  modified_base 10..12: mod_base = OTHER; note = 5-methyl
  modified_base 1: mod_base = OTHER; note = bicyclic nucleic acid (BNA)
  modified_base 5: mod_base = OTHER; note = bicyclic nucleic acid (BNA)
  modified_base 17: mod_base = OTHER; note = bicyclic nucleic acid (BNA)
  source 1..18: mol_type = other RNA
ctgtccaagcccggttga

SEQ ID NO: 11802 - RNA, 18 nt, synthetic construct
  misc_feature 1..18: note = Description of Artificial Sequence: Synthetic Antisense oligonucleotide
  modified_base 1: mod_base = OTHER; note = 5-methyl
  modified_base 5..6: mod_base = OTHER; note = 5-methyl
  modified_base 10..12: mod_base = OTHER; note = 5-methyl
  modified_base 1: mod_base = OTHER; note = bicyclic nucleic acid (BNA)
  modified_base 3: mod_base = OTHER; note = bicyclic nucleic acid (BNA)
  modified_base 11: mod_base = OTHER; note = bicyclic nucleic acid (BNA)
  source 1..18: mol_type = other RNA
ctgtccaagcccggttga

SEQ ID NO: 11803 - RNA, 18 nt, synthetic construct
  misc_feature 1..18: note = Description of Artificial Sequence: Synthetic Antisense oligonucleotide
  modified_base 1: mod_base = OTHER; note = 5-methyl
  modified_base 5..6: mod_base = OTHER; note = 5-methyl
  modified_base 10..12: mod_base = OTHER; note = 5-methyl
  modified_base 1: mod_base = OTHER; note = bicyclic nucleic acid (BNA)
  modified_base 10..11: mod_base = OTHER; note = bicyclic nucleic acid (BNA)
  source 1..18: mol_type = other RNA
ctgtccaagcccggttga

SEQ ID NO: 11804 - RNA, 18 nt, synthetic construct
  misc_feature 1..18: note = Description of Artificial Sequence: Synthetic Antisense oligonucleotide
  modified_base 1: mod_base = OTHER; note = 5-methyl
  modified_base 5..6: mod_base = OTHER; note = 5-methyl
  modified_base 10..12: mod_base = OTHER; note = 5-methyl
  modified_base 1: mod_base = OTHER; note = bicyclic nucleic acid (BNA)
  modified_base 10: mod_base = OTHER; note = bicyclic nucleic acid (BNA)
  modified_base 17: mod_base = OTHER; note = bicyclic nucleic acid (BNA)
  source 1..18: mol_type = other RNA
ctgtccaagcccggttga

SEQ ID NO: 11805 - RNA, 18 nt, synthetic construct
  misc_feature 1..18: note = Description of Artificial Sequence: Synthetic Antisense oligonucleotide
  modified_base 1: mod_base = OTHER; note = 5-methyl
  modified_base 5..6: mod_base = OTHER; note = 5-methyl
  modified_base 10..12: mod_base = OTHER; note = 5-methyl
  modified_base 1: mod_base = OTHER; note = bicyclic nucleic acid (BNA)
  modified_base 12..13: mod_base = OTHER; note = bicyclic nucleic acid (BNA)
  source 1..18: mol_type = other RNA
ctgtccaagcccggttga

SEQ ID NO: 11806 - RNA, 18 nt, synthetic construct
  misc_feature 1..18: note = Description of Artificial Sequence: Synthetic Antisense oligonucleotide
  modified_base 1: mod_base = OTHER; note = 5-methyl
  modified_base 5..6: mod_base = OTHER; note = 5-methyl
  modified_base 10..12: mod_base = OTHER; note = 5-methyl
  modified_base 1: mod_base = OTHER; note = bicyclic nucleic acid (BNA)
  modified_base 5: mod_base = OTHER; note = bicyclic nucleic acid (BNA)
  modified_base 12: mod_base = OTHER; note = bicyclic nucleic acid (BNA)
  source 1..18: mol_type = other RNA
ctgtccaagcccggttga

SEQ ID NO: 11807 - RNA, 18 nt, synthetic construct
  misc_feature 1..18: note = Description of Artificial Sequence: Synthetic Antisense oligonucleotide
  modified_base 1: mod_base = OTHER; note = 5-methyl
  modified_base 5..6: mod_base = OTHER; note = 5-methyl
  modified_base 10..12: mod_base = OTHER; note = 5-methyl
  modified_base 1: mod_base = OTHER; note = bicyclic nucleic acid (BNA)
  modified_base 10: mod_base = OTHER; note = bicyclic nucleic acid (BNA)
  modified_base 14: mod_base = OTHER; note = bicyclic nucleic acid (BNA)
  source 1..18: mol_type = other RNA
ctgtccaagcccggttga

SEQ ID NO: 11808 - RNA, 18 nt, synthetic construct
  misc_feature 1..18: note = Description of Artificial Sequence: Synthetic Antisense oligonucleotide
  modified_base 1: mod_base = OTHER; note = 5-methyl
  modified_base 5..6: mod_base = OTHER; note = 5-methyl
  modified_base 10..12: mod_base = OTHER; note = 5-methyl
  modified_base 1: mod_base = OTHER; note = bicyclic nucleic acid (BNA)
  modified_base 6: mod_base = OTHER; note = bicyclic nucleic acid (BNA)
  modified_base 11: mod_base = OTHER; note = bicyclic nucleic acid (BNA)
  source 1..18: mol_type = other RNA
ctgtccaagcccggttga

SEQ ID NO: 11809 - RNA, 18 nt, synthetic construct
  misc_feature 1..18: note = Description of Artificial Sequence: Synthetic Antisense oligonucleotide
  modified_base 1: mod_base = OTHER; note = 5-methyl
  modified_base 5..6: mod_base = OTHER; note = 5-methyl
  modified_base 10..12: mod_base = OTHER; note = 5-methyl
  modified_base 1: mod_base = OTHER; note = bicyclic nucleic acid (BNA)
  modified_base 6: mod_base = OTHER; note = bicyclic nucleic acid (BNA)
  modified_base 17: mod_base = OTHER; note = bicyclic nucleic acid (BNA)
  source 1..18: mol_type = other RNA
ctgtccaagcccggttga

SEQ ID NO: 11810 - RNA, 18 nt, synthetic construct
  misc_feature 1..18: note = Description of Artificial Sequence: Synthetic Antisense oligonucleotide
  modified_base 1: mod_base = OTHER; note = 5-methyl
  modified_base 5..6: mod_base = OTHER; note = 5-methyl
  modified_base 10..12: mod_base = OTHER; note = 5-methyl
  modified_base 1: mod_base = OTHER; note = bicyclic nucleic acid (BNA)
  modified_base 9: mod_base = OTHER; note = bicyclic nucleic acid (BNA)
  modified_base 13: mod_base = OTHER; note = bicyclic nucleic acid (BNA)
  source 1..18: mol_type = other RNA
ctgtccaagcccggttga

SEQ ID NO: 11811 - RNA, 18 nt, synthetic construct
  misc_feature 1..18: note = Description of Artificial Sequence: Synthetic Antisense oligonucleotide
  modified_base 1: mod_base = OTHER; note = 5-methyl
  modified_base 5..6: mod_base = OTHER; note = 5-methyl
  modified_base 10..12: mod_base = OTHER; note = 5-methyl
  modified_base 1: mod_base = OTHER; note = bicyclic nucleic acid (BNA)
  modified_base 11: mod_base = OTHER; note = bicyclic nucleic acid (BNA)
  modified_base 17: mod_base = OTHER; note = bicyclic nucleic acid (BNA)
  source 1..18: mol_type = other RNA
ctgtccaagcccggttga

SEQ ID NO: 11812 - RNA, 18 nt, synthetic construct
  misc_feature 1..18: note = Description of Artificial Sequence: Synthetic Antisense oligonucleotide
  modified_base 1: mod_base = OTHER; note = 5-methyl
  modified_base 5..6: mod_base = OTHER; note = 5-methyl
  modified_base 10..12: mod_base = OTHER; note = 5-methyl
  modified_base 1: mod_base = OTHER; note = bicyclic nucleic acid (BNA)
  modified_base 3: mod_base = OTHER; note = bicyclic nucleic acid (BNA)
  modified_base 12: mod_base = OTHER; note = bicyclic nucleic acid (BNA)
  source 1..18: mol_type = other RNA
ctgtccaagcccggttga

SEQ ID NO: 11813 - RNA, 18 nt, synthetic construct
  misc_feature 1..18: note = Description of Artificial Sequence: Synthetic Antisense oligonucleotide
  modified_base 1: mod_base = OTHER; note = 5-methyl
  modified_base 5..6: mod_base = OTHER; note = 5-methyl
  modified_base 10..12: mod_base = OTHER; note = 5-methyl
  modified_base 1: mod_base = OTHER; note = bicyclic nucleic acid (BNA)
  modified_base 3: mod_base = OTHER; note = bicyclic nucleic acid (BNA)
  modified_base 5: mod_base = OTHER; note = bicyclic nucleic acid (BNA)
  source 1..18: mol_type = other RNA
ctgtccaagcccggttga

SEQ ID NO: 11814 - RNA, 18 nt, synthetic construct
  misc_feature 1..18: note = Description of Artificial Sequence: Synthetic Antisense oligonucleotide
  modified_base 1: mod_base = OTHER; note = 5-methyl
  modified_base 5..6: mod_base = OTHER; note = 5-methyl
  modified_base 10..12: mod_base = OTHER; note = 5-methyl
  modified_base 1: mod_base = OTHER; note = bicyclic nucleic acid (BNA)
  modified_base 10: mod_base = OTHER; note = bicyclic nucleic acid (BNA)
  modified_base 13: mod_base = OTHER; note = bicyclic nucleic acid (BNA)
  source 1..18: mol_type = other RNA
ctgtccaagcccggttga

SEQ ID NO: 11815 - DNA, 20 bp, synthetic construct
  misc_feature 1..20: note = Description of Artificial Sequence: Synthetic Antisense oligonucleotide
  misc_feature 1..20: note = Original Sequence: tcaaggaagauggcauuucu
  modified_base 1: mod_base = OTHER; note = bicyclic nucleic acid (BNA)
  modified_base 9: mod_base = OTHER; note = bicyclic nucleic acid (BNA)
  modified_base 2: mod_base = OTHER; note = 5-methyl
  modified_base 14: mod_base = OTHER; note = 5-methyl
  modified_base 19: mod_base = OTHER; note = 5-methyl
  source 1..20: mol_type = other DNA
  modified_base 11: mod_base = OTHER; note = Uracil
  modified_base 16: mod_base = OTHER; note = Uracil
  modified_base 17: mod_base = OTHER; note = Uracil
  modified_base 18: mod_base = OTHER; note = Uracil
  modified_base 20: mod_base = OTHER; note = Uracil
tcaaggaagatggcatttct

SEQ ID NO: 11816 - DNA, 20 bp, synthetic construct
  misc_feature 1..20: note = Description of Artificial Sequence: Synthetic Antisense oligonucleotide
  misc_feature 1..20: note = Original Sequence: tcaaggaagauggcauuucu
  modified_base 1: mod_base = OTHER; note = bicyclic nucleic acid (BNA)
  modified_base 5: mod_base = OTHER; note = bicyclic nucleic acid (BNA)
  modified_base 2: mod_base = OTHER; note = 5-methyl
  modified_base 14: mod_base = OTHER; note = 5-methyl
  modified_base 19: mod_base = OTHER; note = 5-methyl
  source 1..20: mol_type = other DNA
  modified_base 11: mod_base = OTHER; note = Uracil
  modified_base 16: mod_base = OTHER; note = Uracil
  modified_base 17: mod_base = OTHER; note = Uracil
  modified_base 18: mod_base = OTHER; note = Uracil
  modified_base 20: mod_base = OTHER; note = Uracil
tcaaggaagatggcatttct

SEQ ID NO: 11817 - DNA, 20 bp, synthetic construct
  misc_feature 1..20: note = Description of Artificial Sequence: Synthetic Antisense oligonucleotide
  misc_feature 1..20: note = Original Sequence: tcaaggaagauggcauuucu
  modified_base 1: mod_base = OTHER; note = bicyclic nucleic acid (BNA)
  modified_base 6: mod_base = OTHER; note = bicyclic nucleic acid (BNA)
  modified_base 2: mod_base = OTHER; note = 5-methyl
  modified_base 14: mod_base = OTHER; note = 5-methyl
  modified_base 19: mod_base = OTHER; note = 5-methyl
  source 1..20: mol_type = other DNA
  modified_base 11: mod_base = OTHER; note = Uracil
  modified_base 16: mod_base = OTHER; note = Uracil
  modified_base 17: mod_base = OTHER; note = Uracil
  modified_base 18: mod_base = OTHER; note = Uracil
  modified_base 20: mod_base = OTHER; note = Uracil
tcaaggaagatggcatttct

SEQ ID NO: 11818 - DNA, 20 bp, synthetic construct
  misc_feature 1..20: note = Description of Artificial Sequence: Synthetic Antisense oligonucleotide
  misc_feature 1..20: note = Original Sequence: tcaaggaagauggcauuucu
  modified_base 1: mod_base = OTHER; note = bicyclic nucleic acid (BNA)
  modified_base 12: mod_base = OTHER; note = bicyclic nucleic acid (BNA)
  modified_base 2: mod_base = OTHER; note = 5-methyl
  modified_base 14: mod_base = OTHER; note = 5-methyl
  modified_base 19: mod_base = OTHER; note = 5-methyl
  source 1..20: mol_type = other DNA
  modified_base 11: mod_base = OTHER; note = Uracil
  modified_base 16: mod_base = OTHER; note = Uracil
  modified_base 17: mod_base = OTHER; note = Uracil
  modified_base 18: mod_base = OTHER; note = Uracil
  modified_base 20: mod_base = OTHER; note = Uracil
tcaaggaagatggcatttct

SEQ ID NO: 11819 - DNA, 20 bp, synthetic construct
  misc_feature 1..20: note = Description of Artificial Sequence: Synthetic Antisense oligonucleotide
  misc_feature 1..20: note = Original Sequence: tcaaggaagauggcauuucu
  modified_base 1: mod_base = OTHER; note = bicyclic nucleic acid (BNA)
  modified_base 13: mod_base = OTHER; note = bicyclic nucleic acid (BNA)
  modified_base 2: mod_base = OTHER; note = 5-methyl
  modified_base 14: mod_base = OTHER; note = 5-methyl
  modified_base 19: mod_base = OTHER; note = 5-methyl
  source 1..20: mol_type = other DNA
  modified_base 11: mod_base = OTHER; note = Uracil
  modified_base 16: mod_base = OTHER; note = Uracil
  modified_base 17: mod_base = OTHER; note = Uracil
  modified_base 18: mod_base = OTHER; note = Uracil
  modified_base 20: mod_base = OTHER; note = Uracil
tcaaggaagatggcatttct

SEQ ID NO: 11820 - DNA, 20 bp, synthetic construct
  misc_feature 1..20: note = Description of Artificial Sequence: Synthetic Antisense oligonucleotide
  misc_feature 1..20: note = Original Sequence: tcaaggaagauggcauuucu
  modified_base 1: mod_base = OTHER; note = bicyclic nucleic acid (BNA)
  modified_base 19: mod_base = OTHER; note = bicyclic nucleic acid (BNA)
  modified_base 2: mod_base = OTHER; note = 5-methyl
  modified_base 14: mod_base = OTHER; note = 5-methyl
  modified_base 19: mod_base = OTHER; note = 5-methyl
  source 1..20: mol_type = other DNA
  modified_base 11: mod_base = OTHER; note = Uracil
  modified_base 16: mod_base = OTHER; note = Uracil
  modified_base 17: mod_base = OTHER; note = Uracil
  modified_base 18: mod_base = OTHER; note = Uracil
  modified_base 20: mod_base = OTHER; note = Uracil
tcaaggaagatggcatttct

SEQ ID NO: 11821 - DNA, 20 bp, synthetic construct
  misc_feature 1..20: note = Description of Artificial Sequence: Synthetic Antisense oligonucleotide
  misc_feature 1..20: note = Original Sequence: tcaaggaagauggcauuucu
  modified_base 1: mod_base = OTHER; note = bicyclic nucleic acid (BNA)
  modified_base 14: mod_base = OTHER; note = bicyclic nucleic acid (BNA)
  modified_base 2: mod_base = OTHER; note = 5-methyl
  modified_base 14: mod_base = OTHER; note = 5-methyl
  modified_base 19: mod_base = OTHER; note = 5-methyl
  source 1..20: mol_type = other DNA
  modified_base 11: mod_base = OTHER; note = Uracil
  modified_base 16: mod_base = OTHER; note = Uracil
  modified_base 17: mod_base = OTHER; note = Uracil
  modified_base 18: mod_base = OTHER; note = Uracil
  modified_base 20: mod_base = OTHER; note = Uracil
tcaaggaagatggcatttct

SEQ ID NO: 11822 - DNA, 22 bp, synthetic construct
  misc_feature 1..22: note = Description of Artificial Sequence: Synthetic Antisense oligonucleotide
  misc_feature 1..22: note = Original Sequence: tcaaggaagauggcauuucuag
  modified_base 1: mod_base = OTHER; note = bicyclic nucleic acid (BNA)
  modified_base 9: mod_base = OTHER; note = bicyclic nucleic acid (BNA)
  modified_base 2: mod_base = OTHER; note = 5-methyl
  modified_base 14: mod_base = OTHER; note = 5-methyl
  modified_base 19: mod_base = OTHER; note = 5-methyl
  source 1..22: mol_type = other DNA
  modified_base 11: mod_base = OTHER; note = Uracil
  modified_base 16: mod_base = OTHER; note = Uracil
  modified_base 17: mod_base = OTHER; note = Uracil
  modified_base 18: mod_base = OTHER; note = Uracil
  modified_base 20: mod_base = OTHER; note = Uracil
tcaaggaagatggcatttctag

SEQ ID NO: 11823 - DNA, 22 bp, synthetic construct
  misc_feature 1..22: note = Description of Artificial Sequence: Synthetic Antisense oligonucleotide
  misc_feature 1..22: note = Original Sequence: tcaaggaagauggcauuucuag
  modified_base 1: mod_base = OTHER; note = bicyclic nucleic acid (BNA)
  modified_base 5: mod_base = OTHER; note = bicyclic nucleic acid (BNA)
  modified_base 2: mod_base = OTHER; note = 5-methyl
  modified_base 14: mod_base = OTHER; note = 5-methyl
  modified_base 19: mod_base = OTHER; note = 5-methyl
  source 1..22: mol_type = other DNA
  modified_base 11: mod_base = OTHER; note = Uracil
  modified_base 16: mod_base = OTHER; note = Uracil
  modified_base 17: mod_base = OTHER; note = Uracil
  modified_base 18: mod_base = OTHER; note = Uracil
  modified_base 20: mod_base = OTHER; note = Uracil
tcaaggaagatggcatttctag

SEQ ID NO: 11824 - DNA, 22 bp, synthetic construct
  misc_feature 1..22: note = Description of Artificial Sequence: Synthetic Antisense oligonucleotide
  misc_feature 1..22: note = Original Sequence: tcaaggaagauggcauuucuag
  modified_base 1: mod_base = OTHER; note = bicyclic nucleic acid (BNA)
  modified_base 6: mod_base = OTHER; note = bicyclic nucleic acid (BNA)
  modified_base 2: mod_base = OTHER; note = 5-methyl
  modified_base 14: mod_base = OTHER; note = 5-methyl
  modified_base 19: mod_base = OTHER; note = 5-methyl
  source 1..22: mol_type = other DNA
  modified_base 11: mod_base = OTHER; note = Uracil
  modified_base 16: mod_base = OTHER; note = Uracil
  modified_base 17: mod_base = OTHER; note = Uracil
  modified_base 18: mod_base = OTHER; note = Uracil
  modified_base 20: mod_base = OTHER; note = Uracil
tcaaggaagatggcatttctag

SEQ ID NO: 11825 - DNA, 22 bp, synthetic construct
  misc_feature 1..22: note = Description of Artificial Sequence: Synthetic Antisense oligonucleotide
  misc_feature 1..22: note = Original Sequence: tcaaggaagauggcauuucuag
  modified_base 1: mod_base = OTHER; note = bicyclic nucleic acid (BNA)
  modified_base 12: mod_base = OTHER; note = bicyclic nucleic acid (BNA)
  modified_base 2: mod_base = OTHER; note = 5-methyl
  modified_base 14: mod_base = OTHER; note = 5-methyl
  modified_base 19: mod_base = OTHER; note = 5-methyl
  source 1..22: mol_type = other DNA
  modified_base 11: mod_base = OTHER; note = Uracil
  modified_base 16: mod_base = OTHER; note = Uracil
  modified_base 17: mod_base = OTHER; note = Uracil
  modified_base 18: mod_base = OTHER; note = Uracil
  modified_base 20: mod_base = OTHER; note = Uracil
tcaaggaagatggcatttctag

SEQ ID NO: 11826 - DNA, 22 bp, synthetic construct
  misc_feature 1..22: note = Description of Artificial Sequence: Synthetic Antisense oligonucleotide
  misc_feature 1..22: note = Original Sequence: tcaaggaagauggcauuucuag
  modified_base 1: mod_base = OTHER; note = bicyclic nucleic acid (BNA)
  modified_base 13: mod_base = OTHER; note = bicyclic nucleic acid (BNA)
  modified_base 2: mod_base = OTHER; note = 5-methyl
  modified_base 14: mod_base = OTHER; note = 5-methyl
  modified_base 19: mod_base = OTHER; note = 5-methyl
  source 1..22: mol_type = other DNA
  modified_base 11: mod_base = OTHER; note = Uracil
  modified_base 16: mod_base = OTHER; note = Uracil
  modified_base 17: mod_base = OTHER; note = Uracil
  modified_base 18: mod_base = OTHER; note = Uracil
  modified_base 20: mod_base = OTHER; note = Uracil
tcaaggaagatggcatttctag

SEQ ID NO: 11827 - DNA, 22 bp, synthetic construct
  misc_feature 1..22: note = Description of Artificial Sequence: Synthetic Antisense oligonucleotide
  misc_feature 1..22: note = Original Sequence: tcaaggaagauggcauuucuag
  modified_base 1: mod_base = OTHER; note = bicyclic nucleic acid (BNA)
  modified_base 19: mod_base = OTHER; note = bicyclic nucleic acid (BNA)
  modified_base 2: mod_base = OTHER; note = 5-methyl
  modified_base 14: mod_base = OTHER; note = 5-methyl
  modified_base 19: mod_base = OTHER; note = 5-methyl
  source 1..22: mol_type = other DNA
  modified_base 11: mod_base = OTHER; note = Uracil
  modified_base 16: mod_base = OTHER; note = Uracil
  modified_base 17: mod_base = OTHER; note = Uracil
  modified_base 18: mod_base = OTHER; note = Uracil
  modified_base 20: mod_base = OTHER; note = Uracil
tcaaggaagatggcatttctag

SEQ ID NO: 11828 - DNA, 22 bp, synthetic construct
  misc_feature 1..22: note = Description of Artificial Sequence: Synthetic Antisense oligonucleotide
  misc_feature 1..22: note = Original Sequence: tcaaggaagauggcauuucuag
  modified_base 1: mod_base = OTHER; note = bicyclic nucleic acid (BNA)
  modified_base 14: mod_base = OTHER; note = bicyclic nucleic acid (BNA)
  modified_base 2: mod_base = OTHER; note = 5-methyl
  modified_base 14: mod_base = OTHER; note = 5-methyl
  modified_base 19: mod_base = OTHER; note = 5-methyl
  source 1..22: mol_type = other DNA
  modified_base 11: mod_base = OTHER; note = Uracil
  modified_base 16: mod_base = OTHER; note = Uracil
  modified_base 17: mod_base = OTHER; note = Uracil
  modified_base 18: mod_base = OTHER; note = Uracil
  modified_base 20: mod_base = OTHER; note = Uracil
tcaaggaagatggcatttctag

SEQ ID NO: 11829 - DNA, 20 bp, synthetic construct
  misc_feature 1..20: note = Description of Artificial Sequence: Synthetic Antisense oligonucleotide
  misc_feature 1..20: note = Original Sequence: tcaaggaagauggcauuucu
  modified_base 1: mod_base = OTHER; note = bicyclic nucleic acid (BNA)
  modified_base 9: mod_base = OTHER; note = bicyclic nucleic acid (BNA)
  modified_base 14: mod_base = OTHER; note = bicyclic nucleic acid (BNA)
  modified_base 2: mod_base = OTHER; note = 5-methyl
  modified_base 14: mod_base = OTHER; note = 5-methyl
  modified_base 19: mod_base = OTHER; note = 5-methyl
  source 1..20: mol_type = other DNA
  modified_base 11: mod_base = OTHER; note = Uracil
  modified_base 16: mod_base = OTHER; note = Uracil
  modified_base 17: mod_base = OTHER; note = Uracil
  modified_base 18: mod_base = OTHER; note = Uracil
  modified_base 20: mod_base = OTHER; note = Uracil
tcaaggaagatggcatttct

SEQ ID NO: 11830 - DNA, 20 bp, synthetic construct
  misc_feature 1..20: note = Description of Artificial Sequence: Synthetic Antisense oligonucleotide
  misc_feature 1..20: note = Original Sequence: tcaaggaagauggcauuucu
  modified_base 1: mod_base = OTHER; note = bicyclic nucleic acid (BNA)
  modified_base 5: mod_base = OTHER; note = bicyclic nucleic acid (BNA)
  modified_base 9: mod_base = OTHER; note = bicyclic nucleic acid (BNA)
  modified_base 2: mod_base = OTHER; note = 5-methyl
  modified_base 14: mod_base = OTHER; note = 5-methyl
  modified_base 19: mod_base = OTHER; note = 5-methyl
  source 1..20: mol_type = other DNA
  modified_base 11: mod_base = OTHER; note = Uracil
  modified_base 16: mod_base = OTHER; note = Uracil
  modified_base 17: mod_base = OTHER; note = Uracil
  modified_base 18: mod_base = OTHER; note = Uracil
  modified_base 20: mod_base = OTHER; note = Uracil
tcaaggaagatggcatttct

SEQ ID NO: 11831 - DNA, 20 bp, synthetic construct
  misc_feature 1..20: note = Description of Artificial Sequence: Synthetic Antisense oligonucleotide
  misc_feature 1..20: note = Original Sequence: tcaaggaagauggcauuucu
  modified_base 1: mod_base = OTHER; note = bicyclic nucleic acid (BNA)
  modified_base 5: mod_base = OTHER; note = bicyclic nucleic acid (BNA)
  modified_base 19: mod_base = OTHER; note = bicyclic nucleic acid (BNA)
  modified_base 2: mod_base = OTHER; note = 5-methyl
  modified_base 14: mod_base = OTHER; note = 5-methyl
  modified_base 19: mod_base = OTHER; note = 5-methyl
  source 1..20: mol_type = other DNA
  modified_base 11: mod_base = OTHER; note = Uracil
  modified_base 16: mod_base = OTHER; note = Uracil
  modified_base 17: mod_base = OTHER; note = Uracil
  modified_base 18: mod_base = OTHER; note = Uracil
  modified_base 20: mod_base = OTHER; note = Uracil
tcaaggaagatggcatttct

SEQ ID NO: 11832 - DNA, 20 bp, synthetic construct
  misc_feature 1..20: note = Description of Artificial Sequence: Synthetic Antisense oligonucleotide
  misc_feature 1..20: note = Original Sequence: tcaaggaagauggcauuucu
  modified_base 1: mod_base = OTHER; note = bicyclic nucleic acid (BNA)
  modified_base 6: mod_base = OTHER; note = bicyclic nucleic acid (BNA)
  modified_base 14: mod_base = OTHER; note = bicyclic nucleic acid (BNA)
  modified_base 2: mod_base = OTHER; note = 5-methyl
  modified_base 14: mod_base = OTHER; note = 5-methyl
  modified_base 19: mod_base = OTHER; note = 5-methyl
  source 1..20: mol_type = other DNA
  modified_base 11: mod_base = OTHER; note = Uracil
  modified_base 16: mod_base = OTHER; note = Uracil
  modified_base 17: mod_base = OTHER; note = Uracil
  modified_base 18: mod_base = OTHER; note = Uracil
  modified_base 20: mod_base = OTHER; note = Uracil
tcaaggaagatggcatttct

SEQ ID NO: 11833 - DNA, 20 bp, synthetic construct
  misc_feature 1..20: note = Description of Artificial Sequence: Synthetic Antisense oligonucleotide
  misc_feature 1..20: note = Original Sequence: tcaaggaagauggcauuucu
  modified_base 1: mod_base = OTHER; note = bicyclic nucleic acid (BNA)
  modified_base 5: mod_base = OTHER; note = bicyclic nucleic acid (BNA)
  modified_base 13: mod_base = OTHER; note = bicyclic nucleic acid (BNA)
  modified_base 2: mod_base = OTHER; note = 5-methyl
  modified_base 14: mod_base = OTHER; note = 5-methyl
  modified_base 19: mod_base = OTHER; note = 5-methyl
  source 1..20: mol_type = other DNA
  modified_base 11: mod_base = OTHER; note = Uracil
  modified_base 16: mod_base = OTHER; note = Uracil
  modified_base 17: mod_base = OTHER; note = Uracil
  modified_base 18: mod_base = OTHER; note = Uracil
  modified_base 20: mod_base = OTHER; note = Uracil
tcaaggaagatggcatttct

SEQ ID NO: 11834 - DNA, 20 bp, synthetic construct
  misc_feature 1..20: note = Description of Artificial Sequence: Synthetic Antisense oligonucleotide
  misc_feature 1..20: note = Original Sequence: tcaaggaagauggcauuucu
  modified_base 1: mod_base = OTHER; note = bicyclic nucleic acid (BNA)
  modified_base 6: mod_base = OTHER; note = bicyclic nucleic acid (BNA)
  modified_base 9: mod_base = OTHER; note = bicyclic nucleic acid (BNA)
  modified_base 2: mod_base = OTHER; note = 5-methyl
  modified_base 14: mod_base = OTHER; note = 5-methyl
  modified_base 19: mod_base = OTHER; note = 5-methyl
  source 1..20: mol_type = other DNA
  modified_base 11: mod_base = OTHER; note = Uracil
  modified_base 16: mod_base = OTHER; note = Uracil
  modified_base 17: mod_base = OTHER; note = Uracil
  modified_base 18: mod_base = OTHER; note = Uracil
  modified_base 20: mod_base = OTHER; note = Uracil
tcaaggaagatggcatttct

SEQ ID NO: 11835 - DNA, 20 bp, synthetic construct
  misc_feature 1..20: note = Description of Artificial Sequence: Synthetic Antisense oligonucleotide
  misc_feature 1..20: note = Original Sequence: tcaaggaagauggcauuucu
  modified_base 1: mod_base = OTHER; note = bicyclic nucleic acid (BNA)
  modified_base 13..14: mod_base = OTHER; note = bicyclic nucleic acid (BNA)
  modified_base 2: mod_base = OTHER; note = 5-methyl
  modified_base 14: mod_base = OTHER; note = 5-methyl
  modified_base 19: mod_base = OTHER; note = 5-methyl
  source 1..20: mol_type = other DNA
  modified_base 11: mod_base = OTHER; note = Uracil
  modified_base 16: mod_base = OTHER; note = Uracil
  modified_base 17: mod_base = OTHER; note = Uracil
  modified_base 18: mod_base = OTHER; note = Uracil
  modified_base 20: mod_base = OTHER; note = Uracil
tcaaggaagatggcatttct

SEQ ID NO: 11836 - DNA, 20 bp, synthetic construct
  misc_feature 1..20: note = Description of Artificial Sequence: Synthetic Antisense oligonucleotide
  misc_feature 1..20: note = Original Sequence: tcaaggaagauggcauuucu
  modified_base 1: mod_base = OTHER; note = bicyclic nucleic acid (BNA)
  modified_base 6: mod_base = OTHER; note = bicyclic nucleic acid (BNA)
  modified_base 13: mod_base = OTHER; note = bicyclic nucleic acid (BNA)
  modified_base 2: mod_base = OTHER; note = 5-methyl
  modified_base 14: mod_base = OTHER; note = 5-methyl
  modified_base 19: mod_base = OTHER; note = 5-methyl
  source 1..20: mol_type = other DNA
  modified_base 11: mod_base = OTHER; note = Uracil
  modified_base 16: mod_base = OTHER; note = Uracil
  modified_base 17: mod_base = OTHER; note = Uracil
  modified_base 18: mod_base = OTHER; note = Uracil
  modified_base 20: mod_base = OTHER; note = Uracil
tcaaggaagatggcatttct

SEQ ID NO: 11837 - DNA, 20 bp, synthetic construct
  misc_feature 1..20: note = Description of Artificial Sequence: Synthetic Antisense oligonucleotide
  misc_feature 1..20: note = Original Sequence: tcaaggaagauggcauuucu
  modified_base 1: mod_base = OTHER; note = bicyclic nucleic acid (BNA)
  modified_base 6: mod_base = OTHER; note = bicyclic nucleic acid (BNA)
  modified_base 19: mod_base = OTHER; note = bicyclic nucleic acid (BNA)
  modified_base 2: mod_base = OTHER; note = 5-methyl
  modified_base 14: mod_base = OTHER; note = 5-methyl
  modified_base 19: mod_base = OTHER; note = 5-methyl
  source 1..20: mol_type = other DNA
  modified_base 11: mod_base = OTHER; note = Uracil
  modified_base 16: mod_base = OTHER; note = Uracil
  modified_base 17: mod_base = OTHER; note = Uracil
  modified_base 18: mod_base = OTHER; note = Uracil
  modified_base 20: mod_base = OTHER; note = Uracil
tcaaggaagatggcatttct

SEQ ID NO: 11838 - DNA, 20 bp, synthetic construct
  misc_feature 1..20: note = Description of Artificial Sequence: Synthetic Antisense oligonucleotide
  misc_feature 1..20: note = Original Sequence: tcaaggaagauggcauuucu
  modified_base 1: mod_base = OTHER; note = bicyclic nucleic acid (BNA)
  modified_base 5: mod_base = OTHER; note = bicyclic nucleic acid (BNA)
  modified_base 14: mod_base = OTHER; note = bicyclic nucleic acid (BNA)
  modified_base 2: mod_base = OTHER; note = 5-methyl
  modified_base 14: mod_base = OTHER; note = 5-methyl
  modified_base 19: mod_base = OTHER; note = 5-methyl
  source 1..20: mol_type = other DNA
  modified_base 11: mod_base = OTHER; note = Uracil
  modified_base 16: mod_base = OTHER; note = Uracil
  modified_base 17: mod_base = OTHER; note = Uracil
  modified_base 18: mod_base = OTHER; note = Uracil
  modified_base 20: mod_base = OTHER; note = Uracil
tcaaggaagatggcatttct

SEQ ID NO: 11839 - DNA, 20 bp, synthetic construct
  misc_feature 1..20: note = Description of Artificial Sequence: Synthetic Antisense oligonucleotide
  misc_feature 1..20: note = Original Sequence: tcaaggaagauggcauuucu
  modified_base 1: mod_base = OTHER; note = bicyclic nucleic acid (BNA)
  modified_base 12: mod_base = OTHER; note = bicyclic nucleic acid (BNA)
  modified_base 19: mod_base = OTHER; note = bicyclic nucleic acid (BNA)
  modified_base 2: mod_base = OTHER; note = 5-methyl
  modified_base 14: mod_base = OTHER; note = 5-methyl
  modified_base 19: mod_base = OTHER; note = 5-methyl
  source 1..20: mol_type = other DNA
  modified_base 11: mod_base = OTHER; note = Uracil
  modified_base 16: mod_base = OTHER; note = Uracil
  modified_base 17: mod_base = OTHER; note = Uracil
  modified_base 18: mod_base = OTHER; note = Uracil
  modified_base 20: mod_base = OTHER; note = Uracil
tcaaggaagatggcatttct

SEQ ID NO: 11840 - DNA, 20 bp, synthetic construct
  misc_feature 1..20: note = Description of Artificial Sequence: Synthetic Antisense oligonucleotide
  misc_feature 1..20: note = Original Sequence: tcaaggaagauggcauuucu
  modified_base 1: mod_base = OTHER; note = bicyclic nucleic acid (BNA)
  modified_base 12: mod_base = OTHER; note = bicyclic nucleic acid (BNA)
  modified_base 14: mod_base = OTHER; note = bicyclic nucleic acid (BNA)
  modified_base 2: mod_base = OTHER; note = 5-methyl
  modified_base 14: mod_base = OTHER; note = 5-methyl
  modified_base 19: mod_base = OTHER; note = 5-methyl
  source 1..20: mol_type = other DNA
  modified_base 11: mod_base = OTHER; note = Uracil
  modified_base 16: mod_base = OTHER; note = Uracil
  modified_base 17: mod_base = OTHER; note = Uracil
  modified_base 18: mod_base = OTHER; note = Uracil
  modified_base 20: mod_base = OTHER; note = Uracil
tcaaggaagatggcatttct

SEQ ID NO: 11841 - DNA, 20 bp, synthetic construct
  misc_feature 1..20: note = Description of Artificial Sequence: Synthetic Antisense oligonucleotide
  misc_feature 1..20: note = Original Sequence: tcaaggaagauggcauuucu
  modified_base 1: mod_base = OTHER; note = bicyclic nucleic acid (BNA)
  modified_base 6: mod_base = OTHER; note = bicyclic nucleic acid (BNA)
  modified_base 12: mod_base = OTHER; note = bicyclic nucleic acid (BNA)
  modified_base 2: mod_base = OTHER; note = 5-methyl
  modified_base 14: mod_base = OTHER; note = 5-methyl
  modified_base 19: mod_base = OTHER; note = 5-methyl
  source 1..20: mol_type = other DNA
  modified_base 11: mod_base = OTHER; note = Uracil
  modified_base 16: mod_base = OTHER; note = Uracil
  modified_base 17: mod_base = OTHER; note = Uracil
  modified_base 18: mod_base = OTHER; note = Uracil
  modified_base 20: mod_base = OTHER; note = Uracil
tcaaggaagatggcatttct

SEQ ID NO: 11842 - DNA, 20 bp, synthetic construct
  misc_feature 1..20: note = Description of Artificial Sequence: Synthetic Antisense oligonucleotide
  misc_feature 1..20: note = Original Sequence: tcaaggaagauggcauuucu
  modified_base 1: mod_base = OTHER; note = bicyclic nucleic acid (BNA)
  modified_base 5..6: mod_base = OTHER; note = bicyclic nucleic acid (BNA)
  modified_base 2: mod_base = OTHER; note = 5-methyl
  modified_base 14: mod_base = OTHER; note = 5-methyl
  modified_base 19: mod_base = OTHER; note = 5-methyl
  source 1..20: mol_type = other DNA
  modified_base 11: mod_base = OTHER; note = Uracil
  modified_base 16: mod_base = OTHER; note = Uracil
  modified_base 17: mod_base = OTHER; note = Uracil
  modified_base 18: mod_base = OTHER; note = Uracil
  modified_base 20: mod_base = OTHER; note = Uracil
tcaaggaagatggcatttct

SEQ ID NO: 11843 - DNA, 20 bp, synthetic construct
  misc_feature 1..20: note = Description of Artificial Sequence: Synthetic Antisense oligonucleotide
  misc_feature 1..20: note = Original Sequence: tcaaggaagauggcauuucu
  modified_base 1: mod_base = OTHER; note = bicyclic nucleic acid (BNA)
  modified_base 9: mod_base = OTHER; note = bicyclic nucleic acid (BNA)
  modified_base 12: mod_base = OTHER; note = bicyclic nucleic acid (BNA)
  modified_base 2: mod_base = OTHER; note = 5-methyl
  modified_base 14: mod_base = OTHER; note = 5-methyl
  modified_base 19: mod_base = OTHER; note = 5-methyl
  source 1..20: mol_type = other DNA
  modified_base 11: mod_base = OTHER; note = Uracil
  modified_base 16: mod_base = OTHER; note = Uracil
  modified_base 17: mod_base = OTHER; note = Uracil
  modified_base 18: mod_base = OTHER; note = Uracil
  modified_base 20: mod_base = OTHER; note = Uracil
tcaaggaagatggcatttct

SEQ ID NO: 11844 - DNA, 20 bp, synthetic construct
  misc_feature 1..20: note = Description of Artificial Sequence: Synthetic Antisense oligonucleotide
  misc_feature 1..20: note = Original Sequence: tcaaggaagauggcauuucu
  modified_base 1: mod_base = OTHER; note = bicyclic nucleic acid (BNA)
  modified_base 13: mod_base = OTHER; note = bicyclic nucleic acid (BNA)
  modified_base 19: mod_base = OTHER; note = bicyclic nucleic acid (BNA)
  modified_base 2: mod_base = OTHER; note = 5-methyl
  modified_base 14: mod_base = OTHER; note = 5-methyl
  modified_base 19: mod_base = OTHER; note = 5-methyl
  source 1..20: mol_type = other DNA
  modified_base 11: mod_base = OTHER; note = Uracil
  modified_base 16: mod_base = OTHER; note = Uracil
  modified_base 17: mod_base = OTHER; note = Uracil
  modified_base 18: mod_base = OTHER; note = Uracil
  modified_base 20: mod_base = OTHER; note = Uracil
tcaaggaagatggcatttct

SEQ ID NO: 11845 - DNA, 20 bp, synthetic construct
  misc_feature 1..20: note = Description of Artificial Sequence: Synthetic Antisense oligonucleotide
  misc_feature 1..20: note = Original Sequence: tcaaggaagauggcauuucu
  modified_base 1: mod_base = OTHER; note = bicyclic nucleic acid (BNA)
  modified_base 12..13: mod_base = OTHER; note = bicyclic nucleic acid (BNA)
  modified_base 2: mod_base = OTHER; note = 5-methyl
  modified_base 14: mod_base = OTHER; note = 5-methyl
  modified_base 19: mod_base = OTHER; note = 5-methyl
  source 1..20: mol_type = other DNA
  modified_base 11: mod_base = OTHER; note = Uracil
  modified_base 16: mod_base = OTHER; note = Uracil
  modified_base 17: mod_base = OTHER; note = Uracil
  modified_base 18: mod_base = OTHER; note = Uracil
  modified_base 20: mod_base = OTHER; note = Uracil
tcaaggaagatggcatttct

SEQ ID NO: 11846 - DNA, 20 bp, synthetic construct
  misc_feature 1..20: note = Description of Artificial Sequence: Synthetic Antisense oligonucleotide
  misc_feature 1..20: note = Original Sequence: tcaaggaagauggcauuucu
  modified_base 1: mod_base = OTHER; note = bicyclic nucleic acid (BNA)
  modified_base 5: mod_base = OTHER; note = bicyclic nucleic acid (BNA)
  modified_base 12: mod_base = OTHER; note = bicyclic nucleic acid (BNA)
  modified_base 2: mod_base = OTHER; note = 5-methyl
  modified_base 14: mod_base = OTHER; note = 5-methyl
  modified_base 19: mod_base = OTHER; note = 5-methyl
  source 1..20: mol_type = other DNA
  modified_base 11: mod_base = OTHER; note = Uracil
  modified_base 16: mod_base = OTHER; note = Uracil
  modified_base 17: mod_base = OTHER; note = Uracil
  modified_base 18: mod_base = OTHER; note = Uracil
  modified_base 20: mod_base = OTHER; note = Uracil
tcaaggaagatggcatttct

SEQ ID NO: 11847 - DNA, 20 bp, synthetic construct
  misc_feature 1..20: note = Description of Artificial Sequence: Synthetic Antisense oligonucleotide
  misc_feature 1..20: note = Original Sequence: tcaaggaagauggcauuucu
  modified_base 1: mod_base = OTHER; note = bicyclic nucleic acid (BNA)
  modified_base 9: mod_base = OTHER; note = bicyclic nucleic acid (BNA)
  modified_base 13: mod_base = OTHER; note = bicyclic nucleic acid (BNA)
  modified_base 2: mod_base = OTHER; note = 5-methyl
  modified_base 14: mod_base = OTHER; note = 5-methyl
  modified_base 19: mod_base = OTHER; note = 5-methyl
  source 1..20: mol_type = other DNA
  modified_base 11: mod_base = OTHER; note = Uracil
  modified_base 16: mod_base = OTHER; note = Uracil
  modified_base 17: mod_base = OTHER; note = Uracil
  modified_base 18: mod_base = OTHER; note = Uracil
  modified_base 20: mod_base = OTHER; note = Uracil
tcaaggaagatggcatttct

SEQ ID NO: 11848 - DNA, 20 bp, synthetic construct
  misc_feature 1..20: note = Description of Artificial Sequence: Synthetic Antisense oligonucleotide
  misc_feature 1..20: note = Original Sequence: tcaaggaagauggcauuucu
  modified_base 1: mod_base = OTHER; note = bicyclic nucleic acid (BNA)
  modified_base 14: mod_base = OTHER; note = bicyclic nucleic acid (BNA)
  modified_base 19: mod_base = OTHER; note = bicyclic nucleic acid (BNA)
  modified_base 2: mod_base = OTHER; note = 5-methyl
  modified_base 14: mod_base = OTHER; note = 5-methyl
  modified_base 19: mod_base = OTHER; note = 5-methyl
  source 1..20: mol_type = other DNA
  modified_base 11: mod_base = OTHER; note = Uracil
  modified_base 16: mod_base = OTHER; note = Uracil
  modified_base 17: mod_base = OTHER; note = Uracil
  modified_base 18: mod_base = OTHER; note = Uracil
  modified_base 20: mod_base = OTHER; note = Uracil
tcaaggaagatggcatttct

SEQ ID NO: 11849 - DNA, 20 bp, synthetic construct
  misc_feature 1..20: note = Description of Artificial Sequence: Synthetic Antisense oligonucleotide
  misc_feature 1..20: note = Original Sequence: tcaaggaagauggcauuucu
  modified_base 1: mod_base = OTHER; note = bicyclic nucleic acid (BNA)
  modified_base 9: mod_base = OTHER; note = bicyclic nucleic acid (BNA)
  modified_base 19: mod_base = OTHER; note = bicyclic nucleic acid (BNA)
  modified_base 2: mod_base = OTHER; note = 5-methyl
  modified_base 14: mod_base = OTHER; note = 5-methyl
  modified_base 19: mod_base = OTHER; note = 5-methyl
  source 1..20: mol_type = other DNA
  modified_base 11: mod_base = OTHER; note = Uracil
  modified_base 16: mod_base = OTHER; note = Uracil
  modified_base 17: mod_base = OTHER; note = Uracil
  modified_base 18: mod_base = OTHER; note = Uracil
  modified_base 20: mod_base = OTHER; note = Uracil
tcaaggaagatggcatttct

SEQ ID NO: 11850 - DNA, 22 bp, synthetic construct
  misc_feature 1..22: note = Description of Artificial Sequence: Synthetic Antisense oligonucleotide
  misc_feature 1..22: note = Original Sequence: tcaaggaagauggcauuucuag
  modified_base 1: mod_base = OTHER; note = bicyclic nucleic acid (BNA)
  modified_base 9: mod_base = OTHER; note = bicyclic nucleic acid (BNA)
  modified_base 14: mod_base = OTHER; note = bicyclic nucleic acid (BNA)
  modified_base 2: mod_base = OTHER; note = 5-methyl
  modified_base 14: mod_base = OTHER; note = 5-methyl
  modified_base 19: mod_base = OTHER; note = 5-methyl
  source 1..22: mol_type = other DNA
  modified_base 11: mod_base = OTHER; note = Uracil
  modified_base 16: mod_base = OTHER; note = Uracil
  modified_base 17: mod_base = OTHER; note = Uracil
  modified_base 18: mod_base = OTHER; note = Uracil
  modified_base 20: mod_base = OTHER; note = Uracil
tcaaggaagatggcatttctag

SEQ ID NO: 11851 - DNA, 22 bp, synthetic construct
  misc_feature 1..22: note = Description of Artificial Sequence: Synthetic Antisense oligonucleotide
  misc_feature 1..22: note = Original Sequence: tcaaggaagauggcauuucuag
  modified_base 1: mod_base = OTHER; note = bicyclic nucleic acid (BNA)
  modified_base 5: mod_base = OTHER; note = bicyclic nucleic acid (BNA)
  modified_base 9: mod_base = OTHER; note = bicyclic nucleic acid (BNA)
  modified_base 2: mod_base = OTHER; note = 5-methyl
  modified_base 14: mod_base = OTHER; note = 5-methyl
  modified_base 19: mod_base = OTHER; note = 5-methyl
  source 1..22: mol_type = other DNA
  modified_base 11: mod_base = OTHER; note = Uracil
  modified_base 16: mod_base = OTHER; note = Uracil
  modified_base 17: mod_base = OTHER; note = Uracil
  modified_base 18: mod_base = OTHER; note = Uracil
  modified_base 20: mod_base = OTHER; note = Uracil
tcaaggaagatggcatttctag

SEQ ID NO: 11852 - DNA, 22 bp, synthetic construct
  misc_feature 1..22: note = Description of Artificial Sequence: Synthetic Antisense oligonucleotide
  misc_feature 1..22: note = Original Sequence: tcaaggaagauggcauuucuag
  modified_base 1: mod_base = OTHER; note = bicyclic nucleic acid (BNA)
  modified_base 5: mod_base = OTHER; note = bicyclic nucleic acid (BNA)
  modified_base 19: mod_base = OTHER; note = bicyclic nucleic acid (BNA)
  modified_base 2: mod_base = OTHER; note = 5-methyl
  modified_base 14: mod_base = OTHER; note = 5-methyl
  modified_base 19: mod_base = OTHER; note = 5-methyl
  source 1..22: mol_type = other DNA
  modified_base 11: mod_base = OTHER; note = Uracil
  modified_base 16: mod_base = OTHER; note = Uracil
  modified_base 17: mod_base = OTHER; note = Uracil
  modified_base 18: mod_base = OTHER; note = Uracil
  modified_base 20: mod_base = OTHER; note = Uracil
tcaaggaagatggcatttctag

SEQ ID NO: 11853 - DNA, 22 bp, synthetic construct
  misc_feature 1..22: note = Description of Artificial Sequence: Synthetic Antisense oligonucleotide
  misc_feature 1..22: note = Original Sequence: tcaaggaagauggcauuucuag
  modified_base 1: mod_base = OTHER; note = bicyclic nucleic acid (BNA)
  modified_base 6: mod_base = OTHER; note = bicyclic nucleic acid (BNA)
  modified_base 14: mod_base = OTHER; note = bicyclic nucleic acid (BNA)
  modified_base 2: mod_base = OTHER; note = 5-methyl
  modified_base 14: mod_base = OTHER; note = 5-methyl
  modified_base 19: mod_base = OTHER; note = 5-methyl
  source 1..22: mol_type = other DNA
  modified_base 11: mod_base = OTHER; note = Uracil
  modified_base 16: mod_base = OTHER; note = Uracil
  modified_base 17: mod_base = OTHER; note = Uracil
  modified_base 18: mod_base = OTHER; note = Uracil
  modified_base 20: mod_base = OTHER; note = Uracil
tcaaggaagatggcatttctag

SEQ ID NO: 11854 - DNA, 22 bp, synthetic construct
  misc_feature 1..22: note = Description of Artificial Sequence: Synthetic Antisense oligonucleotide
  misc_feature 1..22: note = Original Sequence: tcaaggaagauggcauuucuag
  modified_base 1: mod_base = OTHER; note = bicyclic nucleic acid (BNA)
  modified_base 5: mod_base = OTHER; note = bicyclic nucleic acid (BNA)
  modified_base 13: mod_base = OTHER; note = bicyclic nucleic acid (BNA)
  modified_base 2: mod_base = OTHER; note = 5-methyl
  modified_base 14: mod_base = OTHER; note = 5-methyl
  modified_base 19: mod_base = OTHER; note = 5-methyl
  source 1..22: mol_type = other DNA
  modified_base 11: mod_base = OTHER; note = Uracil
  modified_base 16: mod_base = OTHER; note = Uracil
  modified_base 17: mod_base = OTHER; note = Uracil
  modified_base 18: mod_base = OTHER; note = Uracil
  modified_base 20: mod_base = OTHER; note = Uracil
tcaaggaagatggcatttctag

SEQ ID NO: 11855 - DNA, 22 bp, synthetic construct
  misc_feature 1..22: note = Description of Artificial Sequence: Synthetic Antisense oligonucleotide
  misc_feature 1..22: note = Original Sequence: tcaaggaagauggcauuucuag
  modified_base 1: mod_base = OTHER; note = bicyclic nucleic acid (BNA)
  modified_base 6: mod_base = OTHER; note = bicyclic nucleic acid (BNA)
  modified_base 9: mod_base = OTHER; note = bicyclic nucleic acid (BNA)
  modified_base 2: mod_base = OTHER; note = 5-methyl
  modified_base 14: mod_base = OTHER; note = 5-methyl
  modified_base 19: mod_base = OTHER; note = 5-methyl
  source 1..22: mol_type = other DNA
  modified_base 11: mod_base = OTHER; note = Uracil
  modified_base 16: mod_base = OTHER; note = Uracil
  modified_base 17: mod_base = OTHER; note = Uracil
  modified_base 18: mod_base = OTHER; note = Uracil
  modified_base 20: mod_base = OTHER; note = Uracil
tcaaggaagatggcatttctag

SEQ ID NO: 11856 - DNA, 22 bp, synthetic construct
  misc_feature 1..22: note = Description of Artificial Sequence: Synthetic Antisense oligonucleotide
  misc_feature 1..22: note = Original Sequence: tcaaggaagauggcauuucuag
  modified_base 1: mod_base = OTHER; note = bicyclic nucleic acid (BNA)
  modified_base 13..14: mod_base = OTHER; note = bicyclic nucleic acid (BNA)
  modified_base 2: mod_base = OTHER; note = 5-methyl
  modified_base 14: mod_base = OTHER; note = 5-methyl
  modified_base 19: mod_base = OTHER; note = 5-methyl
  source 1..22: mol_type = other DNA
  modified_base 11: mod_base = OTHER; note = Uracil
  modified_base 16: mod_base = OTHER; note = Uracil
  modified_base 17: mod_base = OTHER; note = Uracil
  modified_base 18: mod_base = OTHER; note = Uracil
  modified_base 20: mod_base = OTHER; note = Uracil
tcaaggaagatggcatttctag

SEQ ID NO: 11857 - DNA, 22 bp, synthetic construct
  misc_feature 1..22: note = Description of Artificial Sequence: Synthetic Antisense oligonucleotide
  misc_feature 1..22: note = Original Sequence: tcaaggaagauggcauuucuag
  modified_base 1: mod_base = OTHER; note = bicyclic nucleic acid (BNA)
  modified_base 6: mod_base = OTHER; note = bicyclic nucleic acid (BNA)
  modified_base 13: mod_base = OTHER; note = bicyclic nucleic acid (BNA)
  modified_base 2: mod_base = OTHER; note = 5-methyl
  modified_base 14: mod_base = OTHER; note = 5-methyl
  modified_base 19: mod_base = OTHER; note = 5-methyl
  source 1..22: mol_type = other DNA
  modified_base 11: mod_base = OTHER; note = Uracil
  modified_base 16: mod_base = OTHER; note = Uracil
  modified_base 17: mod_base = OTHER; note = Uracil
  modified_base 18: mod_base = OTHER; note = Uracil
  modified_base 20: mod_base = OTHER; note = Uracil
tcaaggaagatggcatttctag

SEQ ID NO: 11858 - DNA, 22 bp, synthetic construct
  misc_feature 1..22: note = Description of Artificial Sequence: Synthetic Antisense oligonucleotide
  misc_feature 1..22: note = Original Sequence: tcaaggaagauggcauuucuag
  modified_base 1: mod_base = OTHER; note = bicyclic nucleic acid (BNA)
  modified_base 6: mod_base = OTHER; note = bicyclic nucleic acid (BNA)
  modified_base 19: mod_base = OTHER; note = bicyclic nucleic acid (BNA)
  modified_base 2: mod_base = OTHER; note = 5-methyl
  modified_base 14: mod_base = OTHER; note = 5-methyl
  modified_base 19: mod_base = OTHER; note = 5-methyl
  source 1..22: mol_type = other DNA
  modified_base 11: mod_base = OTHER; note = Uracil
  modified_base 16: mod_base = OTHER; note = Uracil
  modified_base 17: mod_base = OTHER; note = Uracil
  modified_base 18: mod_base = OTHER; note = Uracil
  modified_base 20: mod_base = OTHER; note = Uracil
tcaaggaagatggcatttctag

SEQ ID NO: 11859 - DNA, 22 bp, synthetic construct
  misc_feature 1..22: note = Description of Artificial Sequence: Synthetic Antisense oligonucleotide
  misc_feature 1..22: note = Original Sequence: tcaaggaagauggcauuucuag
  modified_base 1: mod_base = OTHER; note = bicyclic nucleic acid (BNA)
  modified_base 5: mod_base = OTHER; note = bicyclic nucleic acid (BNA)
  modified_base 14: mod_base = OTHER; note = bicyclic nucleic acid (BNA)
  modified_base 2: mod_base = OTHER; note = 5-methyl
  modified_base 14: mod_base = OTHER; note = 5-methyl
  modified_base 19: mod_base = OTHER; note = 5-methyl
  source 1..22: mol_type = other DNA
  modified_base 11: mod_base = OTHER; note = Uracil
  modified_base 16: mod_base = OTHER; note = Uracil
  modified_base 17: mod_base = OTHER; note = Uracil
  modified_base 18: mod_base = OTHER; note = Uracil
  modified_base 20: mod_base = OTHER; note = Uracil
tcaaggaagatggcatttctag

SEQ ID NO: 11860 - DNA, 22 bp, synthetic construct
  misc_feature 1..22: note = Description of Artificial Sequence: Synthetic Antisense oligonucleotide
  misc_feature 1..22: note = Original Sequence: tcaaggaagauggcauuucuag
  modified_base 1: mod_base = OTHER; note = bicyclic nucleic acid (BNA)
  modified_base 12: mod_base = OTHER; note = bicyclic nucleic acid (BNA)
  modified_base 19: mod_base = OTHER; note = bicyclic nucleic acid (BNA)
  modified_base 2: mod_base = OTHER; note = 5-methyl
  modified_base 14: mod_base = OTHER; note = 5-methyl
  modified_base 19: mod_base = OTHER; note = 5-methyl
  source 1..22: mol_type = other DNA
  modified_base 11: mod_base = OTHER; note = Uracil
  modified_base 16: mod_base = OTHER; note = Uracil
  modified_base 17: mod_base = OTHER; note = Uracil
  modified_base 18: mod_base = OTHER; note = Uracil
  modified_base 20: mod_base = OTHER; note = Uracil
tcaaggaagatggcatttctag

SEQ ID NO: 11861 - DNA, 22 bp, synthetic construct
  misc_feature 1..22: note = Description of Artificial Sequence: Synthetic Antisense oligonucleotide
  misc_feature 1..22: note = Original Sequence: tcaaggaagauggcauuucuag
  modified_base 1: mod_base = OTHER; note = bicyclic nucleic acid (BNA)
  modified_base 12: mod_base = OTHER; note = bicyclic nucleic acid (BNA)
  modified_base 14: mod_base = OTHER; note = bicyclic nucleic acid (BNA)
  modified_base 2: mod_base = OTHER; note = 5-methyl
  modified_base 14: mod_base = OTHER; note = 5-methyl
  modified_base 19: mod_base = OTHER; note = 5-methyl
  source 1..22: mol_type = other DNA
  modified_base 11: mod_base = OTHER; note = Uracil
  modified_base 16: mod_base = OTHER; note = Uracil
  modified_base 17: mod_base = OTHER; note = Uracil
  modified_base 18: mod_base = OTHER; note = Uracil
  modified_base 20: mod_base = OTHER; note = Uracil
tcaaggaagatggcatttctag

SEQ ID NO: 11862 - DNA, 22 bp, synthetic construct
  misc_feature 1..22: note = Description of Artificial Sequence: Synthetic Antisense oligonucleotide
  misc_feature 1..22: note = Original Sequence: tcaaggaagauggcauuucuag
  modified_base 1: mod_base = OTHER; note = bicyclic nucleic acid (BNA)
  modified_base 6: mod_base = OTHER; note = bicyclic nucleic acid (BNA)
  modified_base 12: mod_base = OTHER; note = bicyclic nucleic acid (BNA)
  modified_base 2: mod_base = OTHER; note = 5-methyl
  modified_base 14: mod_base = OTHER; note = 5-methyl
  modified_base 19: mod_base = OTHER; note = 5-methyl
  source 1..22: mol_type = other DNA
  modified_base 11: mod_base = OTHER; note = Uracil
  modified_base 16: mod_base = OTHER; note = Uracil
  modified_base 17: mod_base = OTHER; note = Uracil
  modified_base 18: mod_base = OTHER; note = Uracil
  modified_base 20: mod_base = OTHER; note = Uracil
tcaaggaagatggcatttctag

SEQ ID NO: 11863 - DNA, 22 bp, synthetic construct
  misc_feature 1..22: note = Description of Artificial Sequence: Synthetic Antisense oligonucleotide
  misc_feature 1..22: note = Original Sequence: tcaaggaagauggcauuucuag
  modified_base 1: mod_base = OTHER; note = bicyclic nucleic acid (BNA)
  modified_base 5..6: mod_base = OTHER; note = bicyclic nucleic acid (BNA)
  modified_base 2: mod_base = OTHER; note = 5-methyl
  modified_base 14: mod_base = OTHER; note = 5-methyl
  modified_base 19: mod_base = OTHER; note = 5-methyl
  source 1..22: mol_type = other DNA
  modified_base 11: mod_base = OTHER; note = Uracil
  modified_base 16: mod_base = OTHER; note = Uracil
  modified_base 17: mod_base = OTHER; note = Uracil
  modified_base 18: mod_base = OTHER; note = Uracil
  modified_base 20: mod_base = OTHER; note = Uracil
tcaaggaagatggcatttctag

SEQ ID NO: 11864 - DNA, 22 bp, synthetic construct
  misc_feature 1..22: note = Description of Artificial Sequence: Synthetic Antisense oligonucleotide
  misc_feature 1..22: note = Original Sequence: tcaaggaagauggcauuucuag
  modified_base 1: mod_base = OTHER; note = bicyclic nucleic acid (BNA)
  modified_base 9: mod_base = OTHER; note = bicyclic nucleic acid (BNA)
  modified_base 12: mod_base = OTHER; note = bicyclic nucleic acid (BNA)
  modified_base 2: mod_base = OTHER; note = 5-methyl
  modified_base 14: mod_base = OTHER; note = 5-methyl
  modified_base 19: mod_base = OTHER; note = 5-methyl
  source 1..22: mol_type = other DNA
  modified_base 11: mod_base = OTHER; note = Uracil
  modified_base 16: mod_base = OTHER; note = Uracil
  modified_base 17: mod_base = OTHER; note = Uracil
  modified_base 18: mod_base = OTHER; note = Uracil
  modified_base 20: mod_base = OTHER; note = Uracil
tcaaggaagatggcatttctag

SEQ ID NO: 11865 - DNA, 22 bp, synthetic construct
  misc_feature 1..22: note = Description of Artificial Sequence: Synthetic Antisense oligonucleotide
  misc_feature 1..22: note = Original Sequence: tcaaggaagauggcauuucuag
  modified_base 1: mod_base = OTHER; note = bicyclic nucleic acid (BNA)
  modified_base 13: mod_base = OTHER; note = bicyclic nucleic acid (BNA)
  modified_base 19: mod_base = OTHER; note = bicyclic nucleic acid (BNA)
  modified_base 2: mod_base = OTHER; note = 5-methyl
  modified_base 14: mod_base = OTHER; note = 5-methyl
  modified_base 19: mod_base = OTHER; note = 5-methyl
  source 1..22: mol_type = other DNA
  modified_base 11: mod_base = OTHER; note = Uracil
  modified_base 16: mod_base = OTHER; note = Uracil
  modified_base 17: mod_base = OTHER; note = Uracil
  modified_base 18: mod_base = OTHER; note = Uracil
  modified_base 20: mod_base = OTHER; note = Uracil
tcaaggaagatggcatttctag

SEQ ID NO: 11866 - DNA, 22 bp, synthetic construct
  misc_feature 1..22: note = Description of Artificial Sequence: Synthetic Antisense oligonucleotide
  misc_feature 1..22: note = Original Sequence: tcaaggaagauggcauuucuag
  modified_base 1: mod_base = OTHER; note = bicyclic nucleic acid (BNA)
  modified_base 12..13: mod_base = OTHER; note = bicyclic nucleic acid (BNA)
  modified_base 2: mod_base = OTHER; note = 5-methyl
  modified_base 14: mod_base = OTHER; note = 5-methyl
  modified_base 19: mod_base = OTHER; note = 5-methyl
  source 1..22: mol_type = other DNA
  modified_base 11: mod_base = OTHER; note = Uracil
  modified_base 16: mod_base = OTHER; note = Uracil
  modified_base 17: mod_base = OTHER; note = Uracil
  modified_base 18: mod_base = OTHER; note = Uracil
  modified_base 20: mod_base = OTHER; note = Uracil
tcaaggaagatggcatttctag

SEQ ID NO: 11867 - DNA, 22 bp, synthetic construct
  misc_feature 1..22: note = Description of Artificial Sequence: Synthetic Antisense oligonucleotide
  misc_feature 1..22: note = Original Sequence: tcaaggaagauggcauuucuag
  modified_base 1: mod_base = OTHER; note = bicyclic nucleic acid (BNA)
  modified_base 5: mod_base = OTHER; note = bicyclic nucleic acid (BNA)
  modified_base 12: mod_base = OTHER; note = bicyclic nucleic acid (BNA)
  modified_base 2: mod_base = OTHER; note = 5-methyl
  modified_base 14: mod_base = OTHER; note = 5-methyl
  modified_base 19: mod_base = OTHER; note = 5-methyl
  source 1..22: mol_type = other DNA
  modified_base 11: mod_base = OTHER; note = Uracil
  modified_base 16: mod_base = OTHER; note = Uracil
  modified_base 17: mod_base = OTHER; note = Uracil
  modified_base 18: mod_base = OTHER; note = Uracil
  modified_base 20: mod_base = OTHER; note = Uracil
tcaaggaagatggcatttctag

SEQ ID NO: 11868 - DNA, 22 bp, synthetic construct
  misc_feature 1..22: note = Description of Artificial Sequence: Synthetic Antisense oligonucleotide
  misc_feature 1..22: note = Original Sequence: tcaaggaagauggcauuucuag
  modified_base 1: mod_base = OTHER; note = bicyclic nucleic acid (BNA)
  modified_base 9: mod_base = OTHER; note = bicyclic nucleic acid (BNA)
  modified_base 13: mod_base = OTHER; note = bicyclic nucleic acid (BNA)
  modified_base 2: mod_base = OTHER; note = 5-methyl
  modified_base 14: mod_base = OTHER; note = 5-methyl
  modified_base 19: mod_base = OTHER; note = 5-methyl
  source 1..22: mol_type = other DNA
  modified_base 11: mod_base = OTHER; note = Uracil
  modified_base 16: mod_base = OTHER; note = Uracil
  modified_base 17: mod_base = OTHER; note = Uracil
  modified_base 18: mod_base = OTHER; note = Uracil
  modified_base 20: mod_base = OTHER; note = Uracil
tcaaggaagatggcatttctag

SEQ ID NO: 11869 - DNA, 22 bp, synthetic construct
  misc_feature 1..22: note = Description of Artificial Sequence: Synthetic Antisense oligonucleotide
  misc_feature 1..22: note = Original Sequence: tcaaggaagauggcauuucuag
  modified_base 1: mod_base = OTHER; note = bicyclic nucleic acid (BNA)
  modified_base 14: mod_base = OTHER; note = bicyclic nucleic acid (BNA)
  modified_base 19: mod_base = OTHER; note = bicyclic nucleic acid (BNA)
  modified_base 2: mod_base = OTHER; note = 5-methyl
  modified_base 14: mod_base = OTHER; note = 5-methyl
  modified_base 19: mod_base = OTHER; note = 5-methyl
  source 1..22: mol_type = other DNA
  modified_base 11: mod_base = OTHER; note = Uracil
  modified_base 16: mod_base = OTHER; note = Uracil
  modified_base 17: mod_base = OTHER; note = Uracil
  modified_base 18: mod_base = OTHER; note = Uracil
  modified_base 20: mod_base = OTHER; note = Uracil
tcaaggaagatggcatttctag

SEQ ID NO: 11870 - DNA, 22 bp, synthetic construct
  misc_feature 1..22: note = Description of Artificial Sequence: Synthetic Antisense oligonucleotide
  misc_feature 1..22: note = Original Sequence: tcaaggaagauggcauuucuag
  modified_base 1: mod_base = OTHER; note = bicyclic nucleic acid (BNA)
  modified_base 9: mod_base = OTHER; note = bicyclic nucleic acid (BNA)
  modified_base 19: mod_base = OTHER; note = bicyclic nucleic acid (BNA)
  modified_base 2: mod_base = OTHER; note = 5-methyl
  modified_base 14: mod_base = OTHER; note = 5-methyl
  modified_base 19: mod_base = OTHER; note = 5-methyl
  source 1..22: mol_type = other DNA
  modified_base 11: mod_base = OTHER; note = Uracil
  modified_base 16: mod_base = OTHER; note = Uracil
  modified_base 17: mod_base = OTHER; note = Uracil
  modified_base 18: mod_base = OTHER; note = Uracil
  modified_base 20: mod_base = OTHER; note = Uracil
tcaaggaagatggcatttctag

SEQ ID NO: 11871 - DNA, 18 bp, synthetic construct
  misc_feature 1..18: note = Description of Artificial Sequence: Synthetic Antisense oligonucleotide
  modified_base 1: mod_base = OTHER; note = bicyclic nucleic acid (BNA)
  modified_base 9: mod_base = OTHER; note = bicyclic nucleic acid (BNA)
  source 1..18: mol_type = other DNA
ggtaagttctgtccaagc

SEQ ID NO: 11872 - DNA, 18 bp, synthetic construct
  misc_feature 1..18: note = Description of Artificial Sequence: Synthetic Antisense oligonucleotide
  modified_base 1: mod_base = OTHER; note = bicyclic nucleic acid (BNA)
  modified_base 11: mod_base = OTHER; note = bicyclic nucleic acid (BNA)
  source 1..18: mol_type = other DNA
ggtaagttctgtccaagc

SEQ ID NO: 11873 - DNA, 18 bp, synthetic construct
  misc_feature 1..18: note = Description of Artificial Sequence: Synthetic Antisense oligonucleotide
  modified_base 1: mod_base = OTHER; note = bicyclic nucleic acid (BNA)
  modified_base 6: mod_base = OTHER; note = bicyclic nucleic acid (BNA)
  source 1..18: mol_type = other DNA
ggtaagttctgtccaagc

SEQ ID NO: 11874 - DNA, 18 bp, synthetic construct
  misc_feature 1..18: note = Description of Artificial Sequence: Synthetic Antisense oligonucleotide
  modified_base 1: mod_base = OTHER; note = bicyclic nucleic acid (BNA)
  modified_base 17: mod_base = OTHER; note = bicyclic nucleic acid (BNA)
  source 1..18: mol_type = other DNA
ggtaagttctgtccaagc

SEQ ID NO: 11875 - DNA, 18 bp, synthetic construct
  misc_feature 1..18: note = Description of Artificial Sequence: Synthetic Antisense oligonucleotide
  modified_base 1: mod_base = OTHER; note = bicyclic nucleic acid (BNA)
  modified_base 13: mod_base = OTHER; note = bicyclic nucleic acid (BNA)
  source 1..18: mol_type = other DNA
ggtaagttctgtccaagc

SEQ ID NO: 11876 - DNA, 18 bp, synthetic construct
  misc_feature 1..18: note = Description of Artificial Sequence: Synthetic Antisense oligonucleotide
  modified_base 1: mod_base = OTHER; note = bicyclic nucleic acid (BNA)
  modified_base 14: mod_base = OTHER; note = bicyclic nucleic acid (BNA)
  source 1..18: mol_type = other DNA
ggtaagttctgtccaagc

SEQ ID NO: 11877 - DNA, 18 bp, synthetic construct
  misc_feature 1..18: note = Description of Artificial Sequence: Synthetic Antisense oligonucleotide
  modified_base 1: mod_base = OTHER; note = bicyclic nucleic acid (BNA)
  modified_base 16: mod_base = OTHER; note = bicyclic nucleic acid (BNA)
  source 1..18: mol_type = other DNA
gtaagttctgtccaagcc

SEQ ID NO: 11878 - DNA, 18 bp, synthetic construct
  misc_feature 1..18: note = Description of Artificial Sequence: Synthetic Antisense oligonucleotide
  modified_base 1: mod_base = OTHER; note = bicyclic nucleic acid (BNA)
  modified_base 10: mod_base = OTHER; note = bicyclic nucleic acid (BNA)
  source 1..18: mol_type = other DNA
gtaagttctgtccaagcc

SEQ ID NO: 11879 - DNA, 18 bp, synthetic construct
  misc_feature 1..18: note = Description of Artificial Sequence: Synthetic Antisense oligonucleotide
  modified_base 1: mod_base = OTHER; note = bicyclic nucleic acid (BNA)
  modified_base 5: mod_base = OTHER; note = bicyclic nucleic acid (BNA)
  source 1..18: mol_type = other DNA
gtaagttctgtccaagcc

SEQ ID NO: 11880 - DNA, 18 bp, synthetic construct
  misc_feature 1..18: note = Description of Artificial Sequence: Synthetic Antisense oligonucleotide
  modified_base 1: mod_base = OTHER; note = bicyclic nucleic acid (BNA)
  modified_base 17: mod_base = OTHER; note = bicyclic nucleic acid (BNA)
  source 1..18: mol_type = other DNA
gtaagttctgtccaagcc

SEQ ID NO: 11881 - DNA, 18 bp, synthetic construct
  misc_feature 1..18: note = Description of Artificial Sequence: Synthetic Antisense oligonucleotide
  modified_base 1: mod_base = OTHER; note = bicyclic nucleic acid (BNA)
  modified_base 12: mod_base = OTHER; note = bicyclic nucleic acid (BNA)
  source 1..18: mol_type = other DNA
gtaagttctgtccaagcc

SEQ ID NO: 11882 - DNA, 18 bp, synthetic construct
  misc_feature 1..18: note = Description of Artificial Sequence: Synthetic Antisense oligonucleotide
  modified_base 1: mod_base = OTHER; note = bicyclic nucleic acid (BNA)
  modified_base 13: mod_base = OTHER; note = bicyclic nucleic acid (BNA)
  source 1..18: mol_type = other DNA
gtaagttctgtccaagcc

SEQ ID NO: 11883 - DNA, 18 bp, synthetic construct
  misc_feature 1..18: note = Description of Artificial Sequence: Synthetic Antisense oligonucleotide
  modified_base 1: mod_base = OTHER; note = bicyclic nucleic acid (BNA)
  modified_base 8: mod_base = OTHER; note = bicyclic nucleic acid (BNA)
  source 1..18: mol_type = other DNA
gtaagttctgtccaagcc

SEQ ID NO: 11884 - DNA, 18 bp, synthetic construct
  misc_feature 1..18: note = Description of Artificial Sequence: Synthetic Antisense oligonucleotide
  modified_base 1: mod_base = OTHER; note = bicyclic nucleic acid (BNA)
  modified_base 4: mod_base = OTHER; note = bicyclic nucleic acid (BNA)
  source 1..18: mol_type = other DNA
agtcggtaagttctgtcc

SEQ ID NO: 11885 - DNA, 18 bp, synthetic construct
  misc_feature 1..18: note = Description of Artificial Sequence: Synthetic Antisense oligonucleotide
  modified_base 1: mod_base = OTHER; note = bicyclic nucleic acid (BNA)
  modified_base 10: mod_base = OTHER; note = bicyclic nucleic acid (BNA)
  source 1..18: mol_type = other DNA
agtcggtaagttctgtcc

SEQ ID NO: 11886 - DNA, 18 bp, synthetic construct
  misc_feature 1..18: note = Description of Artificial Sequence: Synthetic Antisense oligonucleotide
  modified_base 1: mod_base = OTHER; note = bicyclic nucleic acid (BNA)
  modified_base 5: mod_base = OTHER; note = bicyclic nucleic acid (BNA)
  source 1..18: mol_type = other DNA
agtcggtaagttctgtcc

SEQ ID NO: 11887 - DNA, 18 bp, synthetic construct
  misc_feature 1..18: note = Description of Artificial Sequence: Synthetic Antisense oligonucleotide
  modified_base 1: mod_base = OTHER; note = bicyclic nucleic acid (BNA)
  modified_base 6: mod_base = OTHER; note = bicyclic nucleic acid (BNA)
  source 1..18: mol_type = other DNA
agtcggtaagttctgtcc

SEQ ID NO: 11888 - DNA, 18 bp, synthetic construct
  misc_feature 1..18: note = Description of Artificial Sequence: Synthetic Antisense oligonucleotide
  modified_base 1: mod_base = OTHER; note = bicyclic nucleic acid (BNA)
  modified_base 17: mod_base = OTHER; note = bicyclic nucleic acid (BNA)
  source 1..18: mol_type = other DNA
agtcggtaagttctgtcc

SEQ ID NO: 11889 - DNA, 18 bp, synthetic construct
  misc_feature 1..18: note = Description of Artificial Sequence: Synthetic Antisense oligonucleotide
  modified_base 1: mod_base = OTHER; note = bicyclic nucleic acid (BNA)
  modified_base 13: mod_base = OTHER; note = bicyclic nucleic acid (BNA)
  source 1..18: mol_type = other DNA
agtcggtaagttctgtcc

SEQ ID NO: 11890 - DNA, 18 bp, synthetic construct
  misc_feature 1..18: note = Description of Artificial Sequence: Synthetic Antisense oligonucleotide
  modified_base 1: mod_base = OTHER; note = bicyclic nucleic acid (BNA)
  modified_base 15: mod_base = OTHER; note = bicyclic nucleic acid (BNA)
  source 1..18: mol_type = other DNA
agtcggtaagttctgtcc

SEQ ID NO: 11891 - DNA, 18 bp, synthetic construct
  misc_feature 1..18: note = Description of Artificial Sequence: Synthetic Antisense oligonucleotide
  modified_base 1: mod_base = OTHER; note = bicyclic nucleic acid (BNA)
  modified_base 3: mod_base = OTHER; note = bicyclic nucleic acid (BNA)
  source 1..18: mol_type = other DNA
ctgtccaagcccggttga

SEQ ID NO: 11892 - DNA, 18 bp, synthetic construct
  misc_feature 1..18: note = Description of Artificial Sequence: Synthetic Antisense oligonucleotide
  modified_base 1: mod_base = OTHER; note = bicyclic nucleic acid (BNA)
  modified_base 9: mod_base = OTHER; note = bicyclic nucleic acid (BNA)
  source 1..18: mol_type = other DNA
ctgtccaagcccggttga

SEQ ID NO: 11893 - DNA, 18 bp, synthetic construct
  misc_feature 1..18: note = Description of Artificial Sequence: Synthetic Antisense oligonucleotide
  modified_base 1: mod_base = OTHER; note = bicyclic nucleic acid (BNA)
  modified_base 10: mod_base = OTHER; note = bicyclic nucleic acid (BNA)
  source 1..18: mol_type = other DNA
ctgtccaagcccggttga

SEQ ID NO: 11894 - DNA, 18 bp, synthetic construct
  misc_feature 1..18: note = Description of Artificial Sequence: Synthetic Antisense oligonucleotide
  modified_base 1: mod_base = OTHER; note = bicyclic nucleic acid (BNA)
  modified_base 5: mod_base = OTHER; note = bicyclic nucleic acid (BNA)
  source 1..18: mol_type = other DNA
ctgtccaagcccggttga

SEQ ID NO: 11895 - DNA, 18 bp, synthetic construct
  misc_feature 1..18: note = Description of Artificial Sequence: Synthetic Antisense oligonucleotide
  modified_base 1: mod_base = OTHER; note = bicyclic nucleic acid (BNA)
  modified_base 11: mod_base = OTHER; note = bicyclic nucleic acid (BNA)
  source 1..18: mol_type = other DNA
ctgtccaagcccggttga

SEQ ID NO: 11896 - DNA, 18 bp, synthetic construct
  misc_feature 1..18: note = Description of Artificial Sequence: Synthetic Antisense oligonucleotide
  modified_base 1: mod_base = OTHER; note = bicyclic nucleic acid (BNA)
  modified_base 6: mod_base = OTHER; note = bicyclic nucleic acid (BNA)
  source 1..18: mol_type = other DNA
ctgtccaagcccggttga

SEQ ID NO: 11897 - DNA, 18 bp, synthetic construct
  misc_feature 1..18: note = Description of Artificial Sequence: Synthetic Antisense oligonucleotide
  modified_base 1: mod_base = OTHER; note = bicyclic nucleic acid (BNA)
  modified_base 17: mod_base = OTHER; note = bicyclic nucleic acid (BNA)
  source 1..18: mol_type = other DNA
ctgtccaagcccggttga

SEQ ID NO: 11898 - DNA, 18 bp, synthetic construct
  misc_feature 1..18: note = Description of Artificial Sequence: Synthetic Antisense oligonucleotide
  modified_base 1: mod_base = OTHER; note = bicyclic nucleic acid (BNA)
  modified_base 12: mod_base = OTHER; note = bicyclic nucleic acid (BNA)
  source 1..18: mol_type = other DNA
ctgtccaagcccggttga

SEQ ID NO: 11899 - DNA, 18 bp, synthetic construct
  misc_feature 1..18: note = Description of Artificial Sequence: Synthetic Antisense oligonucleotide
  modified_base 1: mod_base = OTHER; note = bicyclic nucleic acid (BNA)
  modified_base 13: mod_base = OTHER; note = bicyclic nucleic acid (BNA)
  source 1..18: mol_type = other DNA
ctgtccaagcccggttga

SEQ ID NO: 11900 - DNA, 18 bp, synthetic construct
  misc_feature 1..18: note = Description of Artificial Sequence: Synthetic Antisense oligonucleotide
  modified_base 1: mod_base = OTHER; note = bicyclic nucleic acid (BNA)
  modified_base 14: mod_base = OTHER; note = bicyclic nucleic acid (BNA)
  source 1..18: mol_type = other DNA
ctgtccaagcccggttga

SEQ ID NO: 11901 - DNA, 18 bp, synthetic construct
  misc_feature 1..18: note = Description of Artificial Sequence: Synthetic Antisense oligonucleotide
  modified_base 1: mod_base = OTHER; note = bicyclic nucleic acid (BNA)
  modified_base 6: mod_base = OTHER; note = bicyclic nucleic acid (BNA)
  modified_base 11: mod_base = OTHER; note = bicyclic nucleic acid (BNA)
  source 1..18: mol_type = other DNA
ggtaagttctgtccaagc

SEQ ID NO: 11902 - DNA, 18 bp, synthetic construct
  misc_feature 1..18: note = Description of Artificial Sequence: Synthetic Antisense oligonucleotide
  modified_base 1: mod_base = OTHER; note = bicyclic nucleic acid (BNA)
  modified_base 9: mod_base = OTHER; note = bicyclic nucleic acid (BNA)
  modified_base 14: mod_base = OTHER; note = bicyclic nucleic acid (BNA)
  source 1..18: mol_type = other DNA
ggtaagttctgtccaagc

SEQ ID NO: 11903 - DNA, 18 bp, synthetic construct
  misc_feature 1..18: note = Description of Artificial Sequence: Synthetic Antisense oligonucleotide
  modified_base 1: mod_base = OTHER; note = bicyclic nucleic acid (BNA)
  modified_base 6: mod_base = OTHER; note = bicyclic nucleic acid (BNA)
  modified_base 17: mod_base = OTHER; note = bicyclic nucleic acid (BNA)
  source 1..18: mol_type = other DNA
ggtaagttctgtccaagc

SEQ ID NO: 11904 - DNA, 18 bp, synthetic construct
  misc_feature 1..18: note = Description of Artificial Sequence: Synthetic Antisense oligonucleotide
  modified_base 1: mod_base = OTHER; note = bicyclic nucleic acid (BNA)
  modified_base 9: mod_base = OTHER; note = bicyclic nucleic acid (BNA)
  modified_base 13: mod_base = OTHER; note = bicyclic nucleic acid (BNA)
  source 1..18: mol_type = other DNA
ggtaagttctgtccaagc

SEQ ID NO: 11905 - DNA, 18 bp, synthetic construct
  misc_feature 1..18: note = Description of Artificial Sequence: Synthetic Antisense oligonucleotide
  modified_base 1: mod_base = OTHER; note = bicyclic nucleic acid (BNA)
  modified_base 13..14: mod_base = OTHER; note = bicyclic nucleic acid (BNA)
  source 1..18: mol_type = other DNA
ggtaagttctgtccaagc

SEQ ID NO: 11906 - DNA, 18 bp, synthetic construct
  misc_feature 1..18: note = Description of Artificial Sequence: Synthetic Antisense oligonucleotide
  modified_base 1: mod_base = OTHER; note = bicyclic nucleic acid (BNA)
  modified_base 11: mod_base = OTHER; note = bicyclic nucleic acid (BNA)
  modified_base 17: mod_base = OTHER; note = bicyclic nucleic acid (BNA)
  source 1..18: mol_type = other DNA
ggtaagttctgtccaagc

SEQ ID NO: 11907 - DNA, 18 bp, synthetic construct
  misc_feature 1..18: note = Description of Artificial Sequence: Synthetic Antisense oligonucleotide
  modified_base 1: mod_base = OTHER; note = bicyclic nucleic acid (BNA)
  modified_base 11: mod_base = OTHER; note = bicyclic nucleic acid (BNA)
  modified_base 14: mod_base = OTHER; note = bicyclic nucleic acid (BNA)
  source 1..18: mol_type = other DNA
ggtaagttctgtccaagc

SEQ ID NO: 11908 - DNA, 18 bp, synthetic construct
  misc_feature 1..18: note = Description of Artificial Sequence: Synthetic Antisense oligonucleotide
  modified_base 1: mod_base = OTHER; note = bicyclic nucleic acid (BNA)
  modified_base 6: mod_base = OTHER; note = bicyclic nucleic acid (BNA)
  modified_base 13: mod_base = OTHER; note = bicyclic nucleic acid (BNA)
  source 1..18: mol_type = other DNA
ggtaagttctgtccaagc

SEQ ID NO: 11909 - DNA, 18 bp, synthetic construct
  misc_feature 1..18: note = Description of Artificial Sequence: Synthetic Antisense oligonucleotide
  modified_base 1: mod_base = OTHER; note = bicyclic nucleic acid (BNA)
  modified_base 6: mod_base = OTHER; note = bicyclic nucleic acid (BNA)
  modified_base 14: mod_base = OTHER; note = bicyclic nucleic acid (BNA)
  source 1..18: mol_type = other DNA
ggtaagttctgtccaagc

SEQ ID NO: 11910 - DNA, 18 bp, synthetic construct
  misc_feature 1..18: note = Description of Artificial Sequence: Synthetic Antisense oligonucleotide
  modified_base 1: mod_base = OTHER; note = bicyclic nucleic acid (BNA)
  modified_base 14: mod_base = OTHER; note = bicyclic nucleic acid (BNA)
  modified_base 17: mod_base = OTHER; note = bicyclic nucleic acid (BNA)
  source 1..18: mol_type = other DNA
ggtaagttctgtccaagc

SEQ ID NO: 11911 - DNA, 18 bp, synthetic construct
  misc_feature 1..18: note = Description of Artificial Sequence: Synthetic Antisense oligonucleotide
  modified_base 1: mod_base = OTHER; note = bicyclic nucleic acid (BNA)
  modified_base 9: mod_base = OTHER; note = bicyclic nucleic acid (BNA)
  modified_base 11: mod_base = OTHER; note = bicyclic nucleic acid (BNA)
  source 1..18: mol_type = other DNA
ggtaagttctgtccaagc

SEQ ID NO: 11912 - DNA, 18 bp, synthetic construct
  misc_feature 1..18: note = Description of Artificial Sequence: Synthetic Antisense oligonucleotide
  modified_base 1: mod_base = OTHER; note = bicyclic nucleic acid (BNA)
  modified_base 11: mod_base = OTHER; note = bicyclic nucleic acid (BNA)
  modified_base 13: mod_base = OTHER; note = bicyclic nucleic acid (BNA)
  source 1..18: mol_type = other DNA
ggtaagttctgtccaagc

SEQ ID NO: 11913 - DNA, 18 bp, synthetic construct
  misc_feature 1..18: note = Description of Artificial Sequence: Synthetic Antisense oligonucleotide
  modified_base 1: mod_base = OTHER; note = bicyclic nucleic acid (BNA)
  modified_base 13: mod_base = OTHER; note = bicyclic nucleic acid (BNA)
  modified_base 17: mod_base = OTHER; note = bicyclic nucleic acid (BNA)
  source 1..18: mol_type = other DNA
ggtaagttctgtccaagc

SEQ ID NO: 11914 - DNA, 18 bp, synthetic construct
  misc_feature 1..18: note = Description of Artificial Sequence: Synthetic Antisense oligonucleotide
  modified_base 1: mod_base = OTHER; note = bicyclic nucleic acid (BNA)
  modified_base 9: mod_base = OTHER; note = bicyclic nucleic acid (BNA)
  modified_base 17: mod_base = OTHER; note = bicyclic nucleic acid (BNA)
  source 1..18: mol_type = other DNA
ggtaagttctgtccaagc

SEQ ID NO: 11915 - DNA, 18 bp, synthetic construct
  misc_feature 1..18: note = Description of Artificial Sequence: Synthetic Antisense oligonucleotide
  modified_base 1: mod_base = OTHER; note = bicyclic nucleic acid (BNA)
  modified_base 6: mod_base = OTHER; note = bicyclic nucleic acid (BNA)
  modified_base 9: mod_base = OTHER; note = bicyclic nucleic acid (BNA)
  source 1..18: mol_type = other DNA
ggtaagttctgtccaagc

SEQ ID NO: 11916 - DNA, 18 bp, synthetic construct
  misc_feature 1..18: note = Description of Artificial Sequence: Synthetic Antisense oligonucleotide
  modified_base 1: mod_base = OTHER; note = bicyclic nucleic acid (BNA)
  modified_base 12: mod_base = OTHER; note = bicyclic nucleic acid (BNA)
  modified_base 17: mod_base = OTHER; note = bicyclic nucleic acid (BNA)
  source 1..18: mol_type = other DNA
gtaagttctgtccaagcc

SEQ ID NO: 11917 - DNA, 18 bp, synthetic construct
  misc_feature 1..18: note = Description of Artificial Sequence: Synthetic Antisense oligonucleotide
  modified_base 1: mod_base = OTHER; note = bicyclic nucleic acid (BNA)
  modified_base 5: mod_base = OTHER; note = bicyclic nucleic acid (BNA)
  modified_base 8: mod_base = OTHER; note = bicyclic nucleic acid (BNA)
  source 1..18: mol_type = other DNA
gtaagttctgtccaagcc

SEQ ID NO: 11918 - DNA, 18 bp, synthetic construct
  misc_feature 1..18: note = Description of Artificial Sequence: Synthetic Antisense oligonucleotide
  modified_base 1: mod_base = OTHER; note = bicyclic nucleic acid (BNA)
  modified_base 8: mod_base = OTHER; note = bicyclic nucleic acid (BNA)
  modified_base 13: mod_base = OTHER; note = bicyclic nucleic acid (BNA)
  source 1..18: mol_type = other DNA
gtaagttctgtccaagcc

SEQ ID NO: 11919 - DNA, 18 bp, synthetic construct
  misc_feature 1..18: note = Description of Artificial Sequence: Synthetic Antisense oligonucleotide
  modified_base 1: mod_base = OTHER; note = bicyclic nucleic acid (BNA)
  modified_base 5: mod_base = OTHER; note = bicyclic nucleic acid (BNA)
  modified_base 13: mod_base = OTHER; note = bicyclic nucleic acid (BNA)
  source 1..18: mol_type = other DNA
gtaagttctgtccaagcc

SEQ ID NO: 11920 - DNA, 18 bp, synthetic construct
  misc_feature 1..18: note = Description of Artificial Sequence: Synthetic Antisense oligonucleotide
  modified_base 1: mod_base = OTHER; note = bicyclic nucleic acid (BNA)
  modified_base 8: mod_base = OTHER; note = bicyclic nucleic acid (BNA)
  modified_base 17: mod_base = OTHER; note = bicyclic nucleic acid (BNA)
  source 1..18: mol_type = other DNA
gtaagttctgtccaagcc

SEQ ID NO: 11921 - DNA, 18 bp, synthetic construct
  misc_feature 1..18: note = Description of Artificial Sequence: Synthetic Antisense oligonucleotide
  modified_base 1: mod_base = OTHER; note = bicyclic nucleic acid (BNA)
  modified_base 13: mod_base = OTHER; note = bicyclic nucleic acid (BNA)
  modified_base 17: mod_base = OTHER; note = bicyclic nucleic acid (BNA)
  source 1..18: mol_type = other DNA
gtaagttctgtccaagcc

SEQ ID NO: 11922 - DNA, 18 bp, synthetic construct
  misc_feature 1..18: note = Description of Artificial Sequence: Synthetic Antisense oligonucleotide
  modified_base 1: mod_base = OTHER; note = bicyclic nucleic acid (BNA)
  modified_base 8: mod_base = OTHER; note = bicyclic nucleic acid (BNA)
  modified_base 12: mod_base = OTHER; note = bicyclic nucleic acid (BNA)
  source 1..18: mol_type = other DNA
gtaagttctgtccaagcc

SEQ ID NO: 11923 - DNA, 18 bp, synthetic construct
  misc_feature 1..18: note = Description of Artificial Sequence: Synthetic Antisense oligonucleotide
  modified_base 1: mod_base = OTHER; note = bicyclic nucleic acid (BNA)
  modified_base 5: mod_base = OTHER; note = bicyclic nucleic acid (BNA)
  modified_base 10: mod_base = OTHER; note = bicyclic nucleic acid (BNA)
  source 1..18: mol_type = other DNA
gtaagttctgtccaagcc

SEQ ID NO: 11924 - DNA, 18 bp, synthetic construct
  misc_feature 1..18: note = Description of Artificial Sequence: Synthetic Antisense oligonucleotide
  modified_base 1: mod_base = OTHER; note = bicyclic nucleic acid (BNA)
  modified_base 8: mod_base = OTHER; note = bicyclic nucleic acid (BNA)
  modified_base 16: mod_base = OTHER; note = bicyclic nucleic acid (BNA)
  source 1..18: mol_type = other DNA
gtaagttctgtccaagcc

SEQ ID NO: 11925 - DNA, 18 bp, synthetic construct
  misc_feature 1..18: note = Description of Artificial Sequence: Synthetic Antisense oligonucleotide
  modified_base 1: mod_base = OTHER; note = bicyclic nucleic acid (BNA)
  modified_base 10: mod_base = OTHER; note = bicyclic nucleic acid (BNA)
  modified_base 16: mod_base = OTHER; note = bicyclic nucleic acid (BNA)
  source 1..18: mol_type = other DNA
gtaagttctgtccaagcc

SEQ ID NO: 11926 - DNA, 18 bp, synthetic construct
  misc_feature 1..18: note = Description of Artificial Sequence: Synthetic Antisense oligonucleotide
  modified_base 1: mod_base = OTHER; note = bicyclic nucleic acid (BNA)
  modified_base 10: mod_base = OTHER; note = bicyclic nucleic acid (BNA)
  modified_base 12: mod_base = OTHER; note = bicyclic nucleic acid (BNA)
  source 1..18: mol_type = other DNA
gtaagttctgtccaagcc

SEQ ID NO: 11927 - DNA, 18 bp, synthetic construct
  misc_feature 1..18: note = Description of Artificial Sequence: Synthetic Antisense oligonucleotide
  modified_base 1: mod_base = OTHER; note = bicyclic nucleic acid (BNA)
  modified_base 5: mod_base = OTHER; note = bicyclic nucleic acid (BNA)
  modified_base 17: mod_base = OTHER; note = bicyclic nucleic acid (BNA)
  source 1..18: mol_type = other DNA
gtaagttctgtccaagcc

SEQ ID NO: 11928 - DNA, 18 bp, synthetic construct
  misc_feature 1..18: note = Description of Artificial Sequence: Synthetic Antisense oligonucleotide
  modified_base 1: mod_base = OTHER; note = bicyclic nucleic acid (BNA)
  modified_base 10: mod_base = OTHER; note = bicyclic nucleic acid (BNA)
  modified_base 17: mod_base = OTHER; note = bicyclic nucleic acid (BNA)
  source 1..18: mol_type = other DNA
gtaagttctgtccaagcc

SEQ ID NO: 11929 - DNA, 18 bp, synthetic construct
  misc_feature 1..18: note = Description of Artificial Sequence: Synthetic Antisense oligonucleotide
  modified_base 1: mod_base = OTHER; note = bicyclic nucleic acid (BNA)
  modified_base 12..13: mod_base = OTHER; note = bicyclic nucleic acid (BNA)
  source 1..18: mol_type = other DNA
gtaagttctgtccaagcc

SEQ ID NO: 11930 - DNA, 18 bp, synthetic construct
  misc_feature 1..18: note = Description of Artificial Sequence: Synthetic Antisense oligonucleotide
  modified_base 1: mod_base = OTHER; note = bicyclic nucleic acid (BNA)
  modified_base 5: mod_base = OTHER; note = bicyclic nucleic acid (BNA)
  modified_base 12: mod_base = OTHER; note = bicyclic nucleic acid (BNA)
  source 1..18: mol_type = other DNA
gtaagttctgtccaagcc

SEQ ID NO: 11931 - DNA, 18 bp, synthetic construct
  misc_feature 1..18: note = Description of Artificial Sequence: Synthetic Antisense oligonucleotide
  modified_base 1: mod_base = OTHER; note = bicyclic nucleic acid (BNA)
  modified_base 8: mod_base = OTHER; note = bicyclic nucleic acid (BNA)
  modified_base 10: mod_base = OTHER; note = bicyclic nucleic acid (BNA)
  source 1..18: mol_type = other DNA
gtaagttctgtccaagcc

SEQ ID NO: 11932 - DNA, 18 bp, synthetic construct
  misc_feature 1..18: note = Description of Artificial Sequence: Synthetic Antisense oligonucleotide
  modified_base 1: mod_base = OTHER; note = bicyclic nucleic acid (BNA)
  modified_base 13: mod_base = OTHER; note = bicyclic nucleic acid (BNA)
  modified_base 16: mod_base = OTHER; note = bicyclic nucleic acid (BNA)
  source 1..18: mol_type = other DNA
gtaagttctgtccaagcc

SEQ ID NO: 11933 - DNA, 18 bp, synthetic construct
  misc_feature 1..18: note = Description of Artificial Sequence: Synthetic Antisense oligonucleotide
  modified_base 1: mod_base = OTHER; note = bicyclic nucleic acid (BNA)
  modified_base 5: mod_base = OTHER; note = bicyclic nucleic acid (BNA)
  modified_base 16: mod_base = OTHER; note = bicyclic nucleic acid (BNA)
  source 1..18: mol_type = other DNA
gtaagttctgtccaagcc

SEQ ID NO: 11934 - DNA, 18 bp, synthetic construct
  misc_feature 1..18: note = Description of Artificial Sequence: Synthetic Antisense oligonucleotide
  modified_base 1: mod_base = OTHER; note = bicyclic nucleic acid (BNA)
  modified_base 12: mod_base = OTHER; note = bicyclic nucleic acid (BNA)
  modified_base 16: mod_base = OTHER; note = bicyclic nucleic acid (BNA)
  source 1..18: mol_type = other DNA
gtaagttctgtccaagcc

SEQ ID NO: 11935 - DNA, 18 bp, synthetic construct
  misc_feature 1..18: note = Description of Artificial Sequence: Synthetic Antisense oligonucleotide
  modified_base 1: mod_base = OTHER; note = bicyclic nucleic acid (BNA)
  modified_base 16..17: mod_base = OTHER; note = bicyclic nucleic acid (BNA)
  source 1..18: mol_type = other DNA
gtaagttctgtccaagcc

SEQ ID NO: 11936 - DNA, 18 bp, synthetic construct
  misc_feature 1..18: note = Description of Artificial Sequence: Synthetic Antisense oligonucleotide
  modified_base 1: mod_base = OTHER; note = bicyclic nucleic acid (BNA)
  modified_base 10: mod_base = OTHER; note = bicyclic nucleic acid (BNA)
  modified_base 13: mod_base = OTHER; note = bicyclic nucleic acid (BNA)
  source 1..18: mol_type = other DNA
gtaagttctgtccaagcc

SEQ ID NO: 11937 - DNA, 18 bp, synthetic construct
  misc_feature 1..18: note = Description of Artificial Sequence: Synthetic Antisense oligonucleotide
  modified_base 1: mod_base = OTHER; note = bicyclic nucleic acid (BNA)
  modified_base 6: mod_base = OTHER; note = bicyclic nucleic acid (BNA)
  modified_base 10: mod_base = OTHER; note = bicyclic nucleic acid (BNA)
  source 1..18: mol_type = other DNA
agtcggtaagttctgtcc

SEQ ID NO: 11938 - DNA, 18 bp, synthetic construct
  misc_feature 1..18: note = Description of Artificial Sequence: Synthetic Antisense oligonucleotide
  modified_base 1: mod_base = OTHER; note = bicyclic nucleic acid (BNA)
  modified_base 5: mod_base = OTHER; note = bicyclic nucleic acid (BNA)
  modified_base 13: mod_base = OTHER; note = bicyclic nucleic acid (BNA)
  source 1..18: mol_type = other DNA
agtcggtaagttctgtcc

SEQ ID NO: 11939 - DNA, 18 bp, synthetic construct
  misc_feature 1..18: note = Description of Artificial Sequence: Synthetic Antisense oligonucleotide
  modified_base 1: mod_base = OTHER; note = bicyclic nucleic acid (BNA)
  modified_base 13: mod_base = OTHER; note = bicyclic nucleic acid (BNA)
  modified_base 17: mod_base = OTHER; note = bicyclic nucleic acid (BNA)
  source 1..18: mol_type = other DNA
agtcggtaagttctgtcc

SEQ ID NO: 11940 - DNA, 18 bp, synthetic construct
  misc_feature 1..18: note = Description of Artificial Sequence: Synthetic Antisense oligonucleotide
  modified_base 1: mod_base = OTHER; note = bicyclic nucleic acid (BNA)
  modified_base 4: mod_base = OTHER; note = bicyclic nucleic acid (BNA)
  modified_base 15: mod_base = OTHER; note = bicyclic nucleic acid (BNA)
  source 1..18: mol_type = other DNA
agtcggtaagttctgtcc

SEQ ID NO: 11941 - DNA, 18 bp, synthetic construct
  misc_feature 1..18: note = Description of Artificial Sequence: Synthetic Antisense oligonucleotide
  modified_base 1: mod_base = OTHER; note = bicyclic nucleic acid (BNA)
  modified_base 5: mod_base = OTHER; note = bicyclic nucleic acid (BNA)
  modified_base 10: mod_base = OTHER; note = bicyclic nucleic acid (BNA)
  source 1..18: mol_type = other DNA
agtcggtaagttctgtcc

SEQ ID NO: 11942 - DNA, 18 bp, synthetic construct
  misc_feature 1..18: note = Description of Artificial Sequence: Synthetic Antisense oligonucleotide
  modified_base 1: mod_base = OTHER; note = bicyclic nucleic acid (BNA)
  modified_base 6: mod_base = OTHER; note = bicyclic nucleic acid (BNA)
  modified_base 13: mod_base = OTHER; note = bicyclic nucleic acid (BNA)
  source 1..18: mol_type = other DNA
agtcggtaagttctgtcc

SEQ ID NO: 11943 - DNA, 18 bp, synthetic construct
  misc_feature 1..18: note = Description of Artificial Sequence: Synthetic Antisense oligonucleotide
  modified_base 1: mod_base = OTHER; note = bicyclic nucleic acid (BNA)
  modified_base 4: mod_base = OTHER; note = bicyclic nucleic acid (BNA)
  modified_base 17: mod_base = OTHER; note = bicyclic nucleic acid (BNA)
  source 1..18: mol_type = other DNA
agtcggtaagttctgtcc

SEQ ID NO: 11944 - DNA, 18 bp, synthetic construct
  misc_feature 1..18: note = Description of Artificial Sequence: Synthetic Antisense oligonucleotide
  modified_base 1: mod_base = OTHER; note = bicyclic nucleic acid (BNA)
  modified_base 10: mod_base = OTHER; note = bicyclic nucleic acid (BNA)
  modified_base 15: mod_base = OTHER; note = bicyclic nucleic acid (BNA)
  source 1..18: mol_type = other DNA
agtcggtaagttctgtcc

SEQ ID NO: 11945 - DNA, 18 bp, synthetic construct
  misc_feature 1..18: note = Description of Artificial Sequence: Synthetic Antisense oligonucleotide
  modified_base 1: mod_base = OTHER; note = bicyclic nucleic acid (BNA)
  modified_base 13: mod_base = OTHER; note = bicyclic nucleic acid (BNA)
  modified_base 15: mod_base = OTHER; note = bicyclic nucleic acid (BNA)
  source 1..18: mol_type = other DNA
agtcggtaagttctgtcc

SEQ ID NO: 11946 - DNA, 18 bp, synthetic construct
  misc_feature 1..18: note = Description of Artificial Sequence: Synthetic Antisense oligonucleotide
  modified_base 1: mod_base = OTHER; note = bicyclic nucleic acid (BNA)
  modified_base 5..6: mod_base = OTHER; note = bicyclic nucleic acid (BNA)
  source 1..18: mol_type = other DNA
agtcggtaagttctgtcc

SEQ ID NO: 11947 - DNA, 18 bp, synthetic construct
  misc_feature 1..18: note = Description of Artificial Sequence: Synthetic Antisense oligonucleotide
  modified_base 1: mod_base = OTHER; note = bicyclic nucleic acid (BNA)
  modified_base 5: mod_base = OTHER; note = bicyclic nucleic acid (BNA)
  modified_base 15: mod_base = OTHER; note = bicyclic nucleic acid (BNA)
  source 1..18: mol_type = other DNA
agtcggtaagttctgtcc

SEQ ID NO: 11948 - DNA, 18 bp, synthetic construct
  misc_feature 1..18: note = Description of Artificial Sequence: Synthetic Antisense oligonucleotide
  modified_base 1: mod_base = OTHER; note = bicyclic nucleic acid (BNA)
  modified_base 5: mod_base = OTHER; note = bicyclic nucleic acid (BNA)
  modified_base 17: mod_base = OTHER; note = bicyclic nucleic acid (BNA)
  source 1..18: mol_type = other DNA
agtcggtaagttctgtcc

SEQ ID NO: 11949 - DNA, 18 bp, synthetic construct
  misc_feature 1..18: note = Description of Artificial Sequence: Synthetic Antisense oligonucleotide
  modified_base 1: mod_base = OTHER; note = bicyclic nucleic acid (BNA)
  modified_base 10: mod_base = OTHER; note = bicyclic nucleic acid (BNA)
  modified_base 17: mod_base = OTHER; note = bicyclic nucleic acid (BNA)
  source 1..18: mol_type = other DNA
agtcggtaagttctgtcc

SEQ ID NO: 11950 - DNA, 18 bp, synthetic construct
  misc_feature 1..18: note = Description of Artificial Sequence: Synthetic Antisense oligonucleotide
  modified_base 1: mod_base = OTHER; note = bicyclic nucleic acid (BNA)
  modified_base 4: mod_base = OTHER; note = bicyclic nucleic acid (BNA)
  modified_base 10: mod_base = OTHER; note = bicyclic nucleic acid (BNA)
  source 1..18: mol_type = other DNA
agtcggtaagttctgtcc

SEQ ID NO: 11951 - DNA, 18 bp, synthetic construct
  misc_feature 1..18: note = Description of Artificial Sequence: Synthetic Antisense oligonucleotide
  modified_base 1: mod_base = OTHER; note = bicyclic nucleic acid (BNA)
  modified_base 4: mod_base = OTHER; note = bicyclic nucleic acid (BNA)
  modified_base 6: mod_base = OTHER; note = bicyclic nucleic acid (BNA)
  source 1..18: mol_type = other DNA
agtcggtaagttctgtcc

SEQ ID NO: 11952 - DNA, 18 bp, synthetic construct
  misc_feature 1..18: note = Description of Artificial Sequence: Synthetic Antisense oligonucleotide
  modified_base 1: mod_base = OTHER; note = bicyclic nucleic acid (BNA)
  modified_base 4: mod_base = OTHER; note = bicyclic nucleic acid (BNA)
  modified_base 13: mod_base = OTHER; note = bicyclic nucleic acid (BNA)
  source 1..18: mol_type = other DNA
agtcggtaagttctgtcc

SEQ ID NO: 11953 - DNA, 18 bp, synthetic construct
  misc_feature 1..18: note = Description of Artificial Sequence: Synthetic Antisense oligonucleotide
  modified_base 1: mod_base = OTHER; note = bicyclic nucleic acid (BNA)
  modified_base 15: mod_base = OTHER; note = bicyclic nucleic acid (BNA)
  modified_base 17: mod_base = OTHER; note = bicyclic nucleic acid (BNA)
  source 1..18: mol_type = other DNA
agtcggtaagttctgtcc

SEQ ID NO: 11954 - DNA, 18 bp, synthetic construct
  misc_feature 1..18: note = Description of Artificial Sequence: Synthetic Antisense oligonucleotide
  modified_base 1: mod_base = OTHER; note = bicyclic nucleic acid (BNA)
  modified_base 6: mod_base = OTHER; note = bicyclic nucleic acid (BNA)
  modified_base 17: mod_base = OTHER; note = bicyclic nucleic acid (BNA)
  source 1..18: mol_type = other DNA
agtcggtaagttctgtcc

SEQ ID NO: 11955 - DNA, 18 bp, synthetic construct
  misc_feature 1..18: note = Description of Artificial Sequence: Synthetic Antisense oligonucleotide
  modified_base 1: mod_base = OTHER; note = bicyclic nucleic acid (BNA)
  modified_base 6: mod_base = OTHER; note = bicyclic nucleic acid (BNA)
  modified_base 15: mod_base = OTHER; note = bicyclic nucleic acid (BNA)
  source 1..18: mol_type = other DNA
agtcggtaagttctgtcc

SEQ ID NO: 11956 - DNA, 18 bp, synthetic construct
  misc_feature 1..18: note = Description of Artificial Sequence: Synthetic Antisense oligonucleotide
  modified_base 1: mod_base = OTHER; note = bicyclic nucleic acid (BNA)
  modified_base 4..5: mod_base = OTHER; note = bicyclic nucleic acid (BNA)
  source 1..18: mol_type = other DNA
agtcggtaagttctgtcc

SEQ ID NO: 11957 - DNA, 18 bp, synthetic construct
  misc_feature 1..18: note = Description of Artificial Sequence: Synthetic Antisense oligonucleotide
  modified_base 1: mod_base = OTHER; note = bicyclic nucleic acid (BNA)
  modified_base 10: mod_base = OTHER; note = bicyclic nucleic acid (BNA)
  modified_base 13: mod_base = OTHER; note = bicyclic nucleic acid (BNA)
  source 1..18: mol_type = other DNA
agtcggtaagttctgtcc

SEQ ID NO: 11958 - DNA, 18 bp, synthetic construct
  misc_feature 1..18: note = Description of Artificial Sequence: Synthetic Antisense oligonucleotide
  modified_base 1: mod_base = OTHER; note = bicyclic nucleic acid (BNA)
  modified_base 12: mod_base = OTHER; note = bicyclic nucleic acid (BNA)
  modified_base 17: mod_base = OTHER; note = bicyclic nucleic acid (BNA)
  source 1..18: mol_type = other DNA
ctgtccaagcccggttga

SEQ ID NO: 11959 - DNA, 18 bp, synthetic construct
  misc_feature 1..18: note = Description of Artificial Sequence: Synthetic Antisense oligonucleotide
  modified_base 1: mod_base = OTHER; note = bicyclic nucleic acid (BNA)
  modified_base 6: mod_base = OTHER; note = bicyclic nucleic acid (BNA)
  modified_base 10: mod_base = OTHER; note = bicyclic nucleic acid (BNA)
  source 1..18: mol_type = other DNA
ctgtccaagcccggttga

SEQ ID NO: 11960 - DNA, 18 bp, synthetic construct
  misc_feature 1..18: note = Description of Artificial Sequence: Synthetic Antisense oligonucleotide
  modified_base 1: mod_base = OTHER; note = bicyclic nucleic acid (BNA)
  modified_base 9: mod_base = OTHER; note = bicyclic nucleic acid (BNA)
  modified_base 14: mod_base = OTHER; note = bicyclic nucleic acid (BNA)
  source 1..18: mol_type = other DNA
ctgtccaagcccggttga

SEQ ID NO: 11961 - DNA, 18 bp, synthetic construct
  misc_feature 1..18: note = Description of Artificial Sequence: Synthetic Antisense oligonucleotide
  modified_base 1: mod_base = OTHER; note = bicyclic nucleic acid (BNA)
  modified_base 11..12: mod_base = OTHER; note = bicyclic nucleic acid (BNA)
  source 1..18: mol_type = other DNA
ctgtccaagcccggttga

SEQ ID NO: 11962 - DNA, 18 bp, synthetic construct
  misc_feature 1..18: note = Description of Artificial Sequence: Synthetic Antisense oligonucleotide
  modified_base 1: mod_base = OTHER; note = bicyclic nucleic acid (BNA)
  modified_base 5: mod_base = OTHER; note = bicyclic nucleic acid (BNA)
  modified_base 9: mod_base = OTHER; note = bicyclic nucleic acid (BNA)
  source 1..18: mol_type = other DNA
ctgtccaagcccggttga

SEQ ID NO: 11963 - DNA, 18 bp, synthetic construct
  misc_feature 1..18: note = Description of Artificial Sequence: Synthetic Antisense oligonucleotide
  modified_base 1: mod_base = OTHER; note = bicyclic nucleic acid (BNA)
  modified_base 3: mod_base = OTHER; note = bicyclic nucleic acid (BNA)
  modified_base 9: mod_base = OTHER; note = bicyclic nucleic acid (BNA)
  source 1..18: mol_type = other DNA
ctgtccaagcccggttga

SEQ ID NO: 11964 - DNA, 18 bp, synthetic construct
  misc_feature 1..18: note = Description of Artificial Sequence: Synthetic Antisense oligonucleotide
  modified_base 1: mod_base = OTHER; note = bicyclic nucleic acid (BNA)
  modified_base 6: mod_base = OTHER; note = bicyclic nucleic acid (BNA)
  modified_base 14: mod_base = OTHER; note = bicyclic nucleic acid (BNA)
  source 1..18: mol_type = other DNA
ctgtccaagcccggttga

SEQ ID NO: 11965 - DNA, 18 bp, synthetic construct
  misc_feature 1..18: note = Description of Artificial Sequence: Synthetic Antisense oligonucleotide
  modified_base 1: mod_base = OTHER; note = bicyclic nucleic acid (BNA)
  modified_base 9..10: mod_base = OTHER; note = bicyclic nucleic acid (BNA)
  source 1..18: mol_type = other DNA
ctgtccaagcccggttga

SEQ ID NO: 11966 - DNA, 18 bp, synthetic construct
  misc_feature 1..18: note = Description of Artificial Sequence: Synthetic Antisense oligonucleotide
  modified_base 1: mod_base = OTHER; note = bicyclic nucleic acid (BNA)
  modified_base 5: mod_base = OTHER; note = bicyclic nucleic acid (BNA)
  modified_base 13: mod_base = OTHER; note = bicyclic nucleic acid (BNA)
  source 1..18: mol_type = other DNA
ctgtccaagcccggttga

SEQ ID NO: 11967 - DNA, 18 bp, synthetic construct
  misc_feature 1..18: note = Description of Artificial Sequence: Synthetic Antisense oligonucleotide
  modified_base 1: mod_base = OTHER; note = bicyclic nucleic acid (BNA)
  modified_base 3: mod_base = OTHER; note = bicyclic nucleic acid (BNA)
  modified_base 13: mod_base = OTHER; note = bicyclic nucleic acid (BNA)
  source 1..18: mol_type = other DNA
ctgtccaagcccggttga

SEQ ID NO: 11968 - DNA, 18 bp, synthetic construct
  misc_feature 1..18: note = Description of Artificial Sequence: Synthetic Antisense oligonucleotide
  modified_base 1: mod_base = OTHER; note = bicyclic nucleic acid (BNA)
  modified_base 13: mod_base = OTHER; note = bicyclic nucleic acid (BNA)
  modified_base 17: mod_base = OTHER; note = bicyclic nucleic acid (BNA)
  source 1..18: mol_type = other DNA
ctgtccaagcccggttga

SEQ ID NO: 11969 - DNA, 18 bp, synthetic construct
  misc_feature 1..18: note = Description of Artificial Sequence: Synthetic Antisense oligonucleotide
  modified_base 1: mod_base = OTHER; note = bicyclic nucleic acid (BNA)
  modified_base 3: mod_base = OTHER; note = bicyclic nucleic acid (BNA)
  modified_base 6: mod_base = OTHER; note = bicyclic nucleic acid (BNA)
  source 1..18: mol_type = other DNA
ctgtccaagcccggttga

SEQ ID NO: 11970 - DNA, 18 bp, synthetic construct
  misc_feature 1..18: note = Description of Artificial Sequence: Synthetic Antisense oligonucleotide
  modified_base 1: mod_base = OTHER; note = bicyclic nucleic acid (BNA)
  modified_base 6: mod_base = OTHER; note = bicyclic nucleic acid (BNA)
  modified_base 9: mod_base = OTHER; note = bicyclic nucleic acid (BNA)
  source 1..18: mol_type = other DNA
ctgtccaagcccggttga

SEQ ID NO: 11971 - DNA, 18 bp, synthetic construct
  misc_feature 1..18: note = Description of Artificial Sequence: Synthetic Antisense oligonucleotide
  modified_base 1: mod_base = OTHER; note = bicyclic nucleic acid (BNA)
  modified_base 5: mod_base = OTHER; note = bicyclic nucleic acid (BNA)
  modified_base 10: mod_base = OTHER; note = bicyclic nucleic acid (BNA)
  source 1..18: mol_type = other DNA
ctgtccaagcccggttga

SEQ ID NO: 11972 - DNA, 18 bp, synthetic construct
  misc_feature 1..18: note = Description of Artificial Sequence: Synthetic Antisense oligonucleotide
  modified_base 1: mod_base = OTHER; note = bicyclic nucleic acid (BNA)
  modified_base 3: mod_base = OTHER; note = bicyclic nucleic acid (BNA)
  modified_base 10: mod_base = OTHER; note = bicyclic nucleic acid (BNA)
  source 1..18: mol_type = other DNA
ctgtccaagcccggttga

SEQ ID NO: 11973 - DNA, 18 bp, synthetic construct
  misc_feature 1..18: note = Description of Artificial Sequence: Synthetic Antisense oligonucleotide
  modified_base 1: mod_base = OTHER; note = bicyclic nucleic acid (BNA)
  modified_base 13..14: mod_base = OTHER; note = bicyclic nucleic acid (BNA)
  source 1..18: mol_type = other DNA
ctgtccaagcccggttga

SEQ ID NO: 11974 - DNA, 18 bp, synthetic construct
  misc_feature 1..18: note = Description of Artificial Sequence: Synthetic Antisense oligonucleotide
  modified_base 1: mod_base = OTHER; note = bicyclic nucleic acid (BNA)
  modified_base 6: mod_base = OTHER; note = bicyclic nucleic acid (BNA)
  modified_base 13: mod_base = OTHER; note = bicyclic nucleic acid (BNA)
  source 1..18: mol_type = other DNA
ctgtccaagcccggttga

SEQ ID NO: 11975 - DNA, 18 bp, synthetic construct
  misc_feature 1..18: note = Description of Artificial Sequence: Synthetic Antisense oligonucleotide
  modified_base 1: mod_base = OTHER; note = bicyclic nucleic acid (BNA)
  modified_base 9: mod_base = OTHER; note = bicyclic nucleic acid (BNA)
  modified_base 11: mod_base = OTHER; note = bicyclic nucleic acid (BNA)
  source 1..18: mol_type = other DNA
ctgtccaagcccggttga

SEQ ID NO: 11976 - DNA, 18 bp, synthetic construct
  misc_feature 1..18: note = Description of Artificial Sequence: Synthetic Antisense oligonucleotide
  modified_base 1: mod_base = OTHER; note = bicyclic nucleic acid (BNA)
  modified_base 14: mod_base = OTHER; note = bicyclic nucleic acid (BNA)
  modified_base 17: mod_base = OTHER; note = bicyclic nucleic acid (BNA)
  source 1..18: mol_type = other DNA
ctgtccaagcccggttga

SEQ ID NO: 11977 - DNA, 18 bp, synthetic construct
  misc_feature 1..18: note = Description of Artificial Sequence: Synthetic Antisense oligonucleotide
  modified_base 1: mod_base = OTHER; note = bicyclic nucleic acid (BNA)
  modified_base 11: mod_base = OTHER; note = bicyclic nucleic acid (BNA)
  modified_base 13: mod_base = OTHER; note = bicyclic nucleic acid (BNA)
  source 1..18: mol_type = other DNA
ctgtccaagcccggttga

SEQ ID NO: 11978 - DNA, 18 bp, synthetic construct
  misc_feature 1..18: note = Description of Artificial Sequence: Synthetic Antisense oligonucleotide
  modified_base 1: mod_base = OTHER; note = bicyclic nucleic acid (BNA)
  modified_base 5: mod_base = OTHER; note = bicyclic nucleic acid (BNA)
  modified_base 14: mod_base = OTHER; note = bicyclic nucleic acid (BNA)
  source 1..18: mol_type = other DNA
ctgtccaagcccggttga

SEQ ID NO: 11979 - DNA, 18 bp, synthetic construct
  misc_feature 1..18: note = Description of Artificial Sequence: Synthetic Antisense oligonucleotide
  modified_base 1: mod_base = OTHER; note = bicyclic nucleic acid (BNA)
  modified_base 3: mod_base = OTHER; note = bicyclic nucleic acid (BNA)
  modified_base 14: mod_base = OTHER; note = bicyclic nucleic acid (BNA)
  source 1..18: mol_type = other DNA
ctgtccaagcccggttga

SEQ ID NO: 11980 - DNA, 18 bp, synthetic construct
  misc_feature 1..18: note = Description of Artificial Sequence: Synthetic Antisense oligonucleotide
  modified_base 1: mod_base = OTHER; note = bicyclic nucleic acid (BNA)
  modified_base 10: mod_base = OTHER; note = bicyclic nucleic acid (BNA)
  modified_base 12: mod_base = OTHER; note = bicyclic nucleic acid (BNA)
  source 1..18: mol_type = other DNA
ctgtccaagcccggttga

SEQ ID NO: 11981 - DNA, 18 bp, synthetic construct
  misc_feature 1..18: note = Description of Artificial Sequence: Synthetic Antisense oligonucleotide
  modified_base 1: mod_base = OTHER; note = bicyclic nucleic acid (BNA)
  modified_base 9: mod_base = OTHER; note = bicyclic nucleic acid (BNA)
  modified_base 17: mod_base = OTHER; note = bicyclic nucleic acid (BNA)
  source 1..18: mol_type = other DNA
ctgtccaagcccggttga

SEQ ID NO: 11982 - DNA, 18 bp, synthetic construct
  misc_feature 1..18: note = Description of Artificial Sequence: Synthetic Antisense oligonucleotide
  modified_base 1: mod_base = OTHER; note = bicyclic nucleic acid (BNA)
  modified_base 12: mod_base = OTHER; note = bicyclic nucleic acid (BNA)
  modified_base 14: mod_base = OTHER; note = bicyclic nucleic acid (BNA)
  source 1..18: mol_type = other DNA
ctgtccaagcccggttga

SEQ ID NO: 11983 - DNA, 18 bp, synthetic construct
  misc_feature 1..18: note = Description of Artificial Sequence: Synthetic Antisense oligonucleotide
  modified_base 1: mod_base = OTHER; note = bicyclic nucleic acid (BNA)
  modified_base 5: mod_base = OTHER; note = bicyclic nucleic acid (BNA)
  modified_base 11: mod_base = OTHER; note = bicyclic nucleic acid (BNA)
  source 1..18: mol_type = other DNA
ctgtccaagcccggttga

SEQ ID NO: 11984 - DNA, 18 bp, synthetic construct
  misc_feature 1..18: note = Description of Artificial Sequence: Synthetic Antisense oligonucleotide
  modified_base 1: mod_base = OTHER; note = bicyclic nucleic acid (BNA)
  modified_base 3: mod_base = OTHER; note = bicyclic nucleic acid (BNA)
  modified_base 17: mod_base = OTHER; note = bicyclic nucleic acid (BNA)
  source 1..18: mol_type = other DNA
ctgtccaagcccggttga

SEQ ID NO: 11985 - DNA, 18 bp, synthetic construct
  misc_feature 1..18: note = Description of Artificial Sequence: Synthetic Antisense oligonucleotide
  modified_base 1: mod_base = OTHER; note = bicyclic nucleic acid (BNA)
  modified_base 6: mod_base = OTHER; note = bicyclic nucleic acid (BNA)
  modified_base 12: mod_base = OTHER; note = bicyclic nucleic acid (BNA)
  source 1..18: mol_type = other DNA
ctgtccaagcccggttga

SEQ ID NO: 11986 - DNA, 18 bp, synthetic construct
  misc_feature 1..18: note = Description of Artificial Sequence: Synthetic Antisense oligonucleotide
  modified_base 1: mod_base = OTHER; note = bicyclic nucleic acid (BNA)
  modified_base 5..6: mod_base = OTHER; note = bicyclic nucleic acid (BNA)
  source 1..18: mol_type = other DNA
ctgtccaagcccggttga

SEQ ID NO: 11987 - DNA, 18 bp, synthetic construct
  misc_feature 1..18: note = Description of Artificial Sequence: Synthetic Antisense oligonucleotide
  modified_base 1: mod_base = OTHER; note = bicyclic nucleic acid (BNA)
  modified_base 11: mod_base = OTHER; note = bicyclic nucleic acid (BNA)
  modified_base 14: mod_base = OTHER; note = bicyclic nucleic acid (BNA)
  source 1..18: mol_type = other DNA
ctgtccaagcccggttga

SEQ ID NO: 11988 - DNA, 18 bp, synthetic construct
  misc_feature 1..18: note = Description of Artificial Sequence: Synthetic Antisense oligonucleotide
  modified_base 1: mod_base = OTHER; note = bicyclic nucleic acid (BNA)
  modified_base 9: mod_base = OTHER; note = bicyclic nucleic acid (BNA)
  modified_base 12: mod_base = OTHER; note = bicyclic nucleic acid (BNA)
  source 1..18: mol_type = other DNA
ctgtccaagcccggttga

SEQ ID NO: 11989 - DNA, 18 bp, synthetic construct
  misc_feature 1..18: note = Description of Artificial Sequence: Synthetic Antisense oligonucleotide
  modified_base 1: mod_base = OTHER; note = bicyclic nucleic acid (BNA)
  modified_base 5: mod_base = OTHER; note = bicyclic nucleic acid (BNA)
  modified_base 17: mod_base = OTHER; note = bicyclic nucleic acid (BNA)
  source 1..18: mol_type = other DNA
ctgtccaagcccggttga

SEQ ID NO: 11990 - DNA, 18 bp, synthetic construct
  misc_feature 1..18: note = Description of Artificial Sequence: Synthetic Antisense oligonucleotide
  modified_base 1: mod_base = OTHER; note = bicyclic nucleic acid (BNA)
  modified_base 3: mod_base = OTHER; note = bicyclic nucleic acid (BNA)
  modified_base 11: mod_base = OTHER; note = bicyclic nucleic acid (BNA)
  source 1..18: mol_type = other DNA
ctgtccaagcccggttga

SEQ ID NO: 11991 - DNA, 18 bp, synthetic construct
  misc_feature 1..18: note = Description of Artificial Sequence: Synthetic Antisense oligonucleotide
  modified_base 1: mod_base = OTHER; note = bicyclic nucleic acid (BNA)
  modified_base 10..11: mod_base = OTHER; note = bicyclic nucleic acid (BNA)
  source 1..18: mol_type = other DNA
ctgtccaagcccggttga

SEQ ID NO: 11992 - DNA, 18 bp, synthetic construct
  misc_feature 1..18: note = Description of Artificial Sequence: Synthetic Antisense oligonucleotide
  modified_base 1: mod_base = OTHER; note = bicyclic nucleic acid (BNA)
  modified_base 10: mod_base = OTHER; note = bicyclic nucleic acid (BNA)
  modified_base 17: mod_base = OTHER; note = bicyclic nucleic acid (BNA)
  source 1..18: mol_type = other DNA
ctgtccaagcccggttga

SEQ ID NO: 11993 - DNA, 18 bp, synthetic construct
  misc_feature 1..18: note = Description of Artificial Sequence: Synthetic Antisense oligonucleotide
  modified_base 1: mod_base = OTHER; note = bicyclic nucleic acid (BNA)
  modified_base 12..13: mod_base = OTHER; note = bicyclic nucleic acid (BNA)
  source 1..18: mol_type = other DNA
ctgtccaagcccggttga

SEQ ID NO: 11994 - DNA, 18 bp, synthetic construct
  misc_feature 1..18: note = Description of Artificial Sequence: Synthetic Antisense oligonucleotide
  modified_base 1: mod_base = OTHER; note = bicyclic nucleic acid (BNA)
  modified_base 5: mod_base = OTHER; note = bicyclic nucleic acid (BNA)
  modified_base 12: mod_base = OTHER; note = bicyclic nucleic acid (BNA)
  source 1..18: mol_type = other DNA
ctgtccaagcccggttga

SEQ ID NO: 11995 - DNA, 18 bp, synthetic construct
  misc_feature 1..18: note = Description of Artificial Sequence: Synthetic Antisense oligonucleotide
  modified_base 1: mod_base = OTHER; note = bicyclic nucleic acid (BNA)
  modified_base 10: mod_base = OTHER; note = bicyclic nucleic acid (BNA)
  modified_base 14: mod_base = OTHER; note = bicyclic nucleic acid (BNA)
  source 1..18: mol_type = other DNA
ctgtccaagcccggttga

SEQ ID NO: 11996 - DNA, 18 bp, synthetic construct
  misc_feature 1..18: note = Description of Artificial Sequence: Synthetic Antisense oligonucleotide
  modified_base 1: mod_base = OTHER; note = bicyclic nucleic acid (BNA)
  modified_base 6: mod_base = OTHER; note = bicyclic nucleic acid (BNA)
  modified_base 11: mod_base = OTHER; note = bicyclic nucleic acid (BNA)
  source 1..18: mol_type = other DNA
ctgtccaagcccggttga

SEQ ID NO: 11997 - DNA, 18 bp, synthetic construct
  misc_feature 1..18: note = Description of Artificial Sequence: Synthetic Antisense oligonucleotide
  modified_base 1: mod_base = OTHER; note = bicyclic nucleic acid (BNA)
  modified_base 6: mod_base = OTHER; note = bicyclic nucleic acid (BNA)
  modified_base 17: mod_base = OTHER; note = bicyclic nucleic acid (BNA)
  source 1..18: mol_type = other DNA
ctgtccaagcccggttga

SEQ ID NO: 11998 - DNA, 18 bp, synthetic construct
  misc_feature 1..18: note = Description of Artificial Sequence: Synthetic Antisense oligonucleotide
  modified_base 1: mod_base = OTHER; note = bicyclic nucleic acid (BNA)
  modified_base 9: mod_base = OTHER; note = bicyclic nucleic acid (BNA)
  modified_base 13: mod_base = OTHER; note = bicyclic nucleic acid (BNA)
  source 1..18: mol_type = other DNA
ctgtccaagcccggttga

SEQ ID NO: 11999 - DNA, 18 bp, synthetic construct
  misc_feature 1..18: note = Description of Artificial Sequence: Synthetic Antisense oligonucleotide
  modified_base 1: mod_base = OTHER; note = bicyclic nucleic acid (BNA)
  modified_base 11: mod_base = OTHER; note = bicyclic nucleic acid (BNA)
  modified_base 17: mod_base = OTHER; note = bicyclic nucleic acid (BNA)
  source 1..18: mol_type = other DNA
ctgtccaagcccggttga

SEQ ID NO: 12000 - DNA, 18 bp, synthetic construct
  misc_feature 1..18: note = Description of Artificial Sequence: Synthetic Antisense oligonucleotide
  modified_base 1: mod_base = OTHER; note = bicyclic nucleic acid (BNA)
  modified_base 3: mod_base = OTHER; note = bicyclic nucleic acid (BNA)
  modified_base 12: mod_base = OTHER; note = bicyclic nucleic acid (BNA)
  source 1..18: mol_type = other DNA
ctgtccaagcccggttga

SEQ ID NO: 12001 - DNA, 18 bp, synthetic construct
  misc_feature 1..18: note = Description of Artificial Sequence: Synthetic Antisense oligonucleotide
  modified_base 1: mod_base = OTHER; note = bicyclic nucleic acid (BNA)
  modified_base 3: mod_base = OTHER; note = bicyclic nucleic acid (BNA)
  modified_base 5: mod_base = OTHER; note = bicyclic nucleic acid (BNA)
  source 1..18: mol_type = other DNA
ctgtccaagcccggttga

SEQ ID NO: 12002 - DNA, 18 bp, synthetic construct
  misc_feature 1..18: note = Description of Artificial Sequence: Synthetic Antisense oligonucleotide
  modified_base 1: mod_base = OTHER; note = bicyclic nucleic acid (BNA)
  modified_base 10: mod_base = OTHER; note = bicyclic nucleic acid (BNA)
  modified_base 13: mod_base = OTHER; note = bicyclic nucleic acid (BNA)
  source 1..18: mol_type = other DNA
ctgtccaagcccggttga

SEQ ID NO: 12003 - DNA, 20 bp, synthetic construct
  misc_feature 1..20: note = Description of Artificial Sequence: Synthetic Antisense oligonucleotide
  modified_base 1: mod_base = OTHER; note = bicyclic nucleic acid (BNA)
  modified_base 9: mod_base = OTHER; note = bicyclic nucleic acid (BNA)
  source 1..20: mol_type = other DNA
tcaaggaagatggcatttct

SEQ ID NO: 12004 - DNA, 20 bp, synthetic construct
  misc_feature 1..20: note = Description of Artificial Sequence: Synthetic Antisense oligonucleotide
  modified_base 1: mod_base = OTHER; note = bicyclic nucleic acid (BNA)
  modified_base 5: mod_base = OTHER; note = bicyclic nucleic acid (BNA)
  source 1..20: mol_type = other DNA
tcaaggaagatggcatttct

SEQ ID NO: 12005 - DNA, 20 bp, synthetic construct
  misc_feature 1..20: note = Description of Artificial Sequence: Synthetic Antisense oligonucleotide
  modified_base 1: mod_base = OTHER; note = bicyclic nucleic acid (BNA)
  modified_base 6: mod_base = OTHER; note = bicyclic nucleic acid (BNA)
  source 1..20: mol_type = other DNA
tcaaggaagatggcatttct

SEQ ID NO: 12006 - DNA, 20 bp, synthetic construct
  misc_feature 1..20: note = Description of Artificial Sequence: Synthetic Antisense oligonucleotide
  modified_base 1: mod_base = OTHER; note = bicyclic nucleic acid (BNA)
  modified_base 12: mod_base = OTHER; note = bicyclic nucleic acid (BNA)
  source 1..20: mol_type = other DNA
tcaaggaagatggcatttct

SEQ ID NO: 12007 - DNA, 20 bp, synthetic construct
  misc_feature 1..20: note = Description of Artificial Sequence: Synthetic Antisense oligonucleotide
  modified_base 1: mod_base = OTHER; note = bicyclic nucleic acid (BNA)
  modified_base 13: mod_base = OTHER; note = bicyclic nucleic acid (BNA)
  source 1..20: mol_type = other DNA
tcaaggaagatggcatttct

SEQ ID NO: 12008 - DNA, 20 bp, synthetic construct
  misc_feature 1..20: note = Description of Artificial Sequence: Synthetic Antisense oligonucleotide
  modified_base 1: mod_base = OTHER; note = bicyclic nucleic acid (BNA)
  modified_base 19: mod_base = OTHER; note = bicyclic nucleic acid (BNA)
  source 1..20: mol_type = other DNA
tcaaggaagatggcatttct

SEQ ID NO: 12009 - DNA, 20 bp, synthetic construct
  misc_feature 1..20: note = Description of Artificial Sequence: Synthetic Antisense oligonucleotide
  modified_base 1: mod_base = OTHER; note = bicyclic nucleic acid (BNA)
  modified_base 14: mod_base = OTHER; note = bicyclic nucleic acid (BNA)
  source 1..20: mol_type = other DNA
tcaaggaagatggcatttct

SEQ ID NO: 12010 - DNA, 22 bp, synthetic construct
  misc_feature 1..22: note = Description of Artificial Sequence: Synthetic Antisense oligonucleotide
  modified_base 1: mod_base = OTHER; note = bicyclic nucleic acid (BNA)
  modified_base 9: mod_base = OTHER; note = bicyclic nucleic acid (BNA)
  source 1..22: mol_type = other DNA
tcaaggaagatggcatttctag

SEQ ID NO: 12011 - DNA, 22 bp, synthetic construct
  misc_feature 1..22: note = Description of Artificial Sequence: Synthetic Antisense oligonucleotide
  modified_base 1: mod_base = OTHER; note = bicyclic nucleic acid (BNA)
  modified_base 5: mod_base = OTHER; note = bicyclic nucleic acid (BNA)
  source 1..22: mol_type = other DNA
tcaaggaagatggcatttctag

SEQ ID NO: 12012 - DNA, 22 bp, synthetic construct
  misc_feature 1..22: note = Description of Artificial Sequence: Synthetic Antisense oligonucleotide
  modified_base 1: mod_base = OTHER; note = bicyclic nucleic acid (BNA)
  modified_base 6: mod_base = OTHER; note = bicyclic nucleic acid (BNA)
  source 1..22: mol_type = other DNA
tcaaggaagatggcatttctag

SEQ ID NO: 12013 - DNA, 22 bp, synthetic construct
  misc_feature 1..22: note = Description of Artificial Sequence: Synthetic Antisense oligonucleotide
  modified_base 1: mod_base = OTHER; note = bicyclic nucleic acid (BNA)
  modified_base 12: mod_base = OTHER; note = bicyclic nucleic acid (BNA)
  source 1..22: mol_type = other DNA
tcaaggaagatggcatttctag

SEQ ID NO: 12014 - DNA, 22 bp, synthetic construct
  misc_feature 1..22: note = Description of Artificial Sequence: Synthetic Antisense oligonucleotide
  modified_base 1: mod_base = OTHER; note = bicyclic nucleic acid (BNA)
  modified_base 13: mod_base = OTHER; note = bicyclic nucleic acid (BNA)
  source 1..22: mol_type = other DNA
tcaaggaagatggcatttctag

SEQ ID NO: 12015 - DNA, 22 bp, synthetic construct
  misc_feature 1..22: note = Description of Artificial Sequence: Synthetic Antisense oligonucleotide
  modified_base 1: mod_base = OTHER; note = bicyclic nucleic acid (BNA)
  modified_base 19: mod_base = OTHER; note = bicyclic nucleic acid (BNA)
  source 1..22: mol_type = other DNA
tcaaggaagatggcatttctag

SEQ ID NO: 12016 - DNA, 22 bp, synthetic construct
  misc_feature 1..22: note = Description of Artificial Sequence: Synthetic Antisense oligonucleotide
  modified_base 1: mod_base = OTHER; note = bicyclic nucleic acid (BNA)
  modified_base 14: mod_base = OTHER; note = bicyclic nucleic acid (BNA)
  source 1..22: mol_type = other DNA
tcaaggaagatggcatttctag

SEQ ID NO: 12017 - DNA, 20 bp, synthetic construct
  misc_feature 1..20: note = Description of Artificial Sequence: Synthetic Antisense oligonucleotide
  modified_base 1: mod_base = OTHER; note = bicyclic nucleic acid (BNA)
  modified_base 9: mod_base = OTHER; note = bicyclic nucleic acid (BNA)
  modified_base 14: mod_base = OTHER; note = bicyclic nucleic acid (BNA)
  source 1..20: mol_type = other DNA
tcaaggaagatggcatttct

SEQ ID NO: 12018 - DNA, 20 bp, synthetic construct
  misc_feature 1..20: note = Description of Artificial Sequence: Synthetic Antisense oligonucleotide
  modified_base 1: mod_base = OTHER; note = bicyclic nucleic acid (BNA)
  modified_base 5: mod_base = OTHER; note = bicyclic nucleic acid (BNA)
  modified_base 9: mod_base = OTHER; note = bicyclic nucleic acid (BNA)
  source 1..20: mol_type = other DNA
tcaaggaagatggcatttct

SEQ ID NO: 12019 - DNA, 20 bp, synthetic construct
  misc_feature 1..20: note = Description of Artificial Sequence: Synthetic Antisense oligonucleotide
  modified_base 1: mod_base = OTHER; note = bicyclic nucleic acid (BNA)
  modified_base 5: mod_base = OTHER; note = bicyclic nucleic acid (BNA)
  modified_base 19: mod_base = OTHER; note = bicyclic nucleic acid (BNA)
  source 1..20: mol_type = other DNA
tcaaggaagatggcatttct

SEQ ID NO: 12020 - DNA, 20 bp, synthetic construct
  misc_feature 1..20: note = Description of Artificial Sequence: Synthetic Antisense oligonucleotide
  modified_base 1: mod_base = OTHER; note = bicyclic nucleic acid (BNA)
  modified_base 6: mod_base = OTHER; note = bicyclic nucleic acid (BNA)
  modified_base 14: mod_base = OTHER; note = bicyclic nucleic acid (BNA)
  source 1..20: mol_type = other DNA
tcaaggaagatggcatttct

SEQ ID NO: 12021 - DNA, 20 bp, synthetic construct
  misc_feature 1..20: note = Description of Artificial Sequence: Synthetic Antisense oligonucleotide
  modified_base 1: mod_base = OTHER; note = bicyclic nucleic acid (BNA)
  modified_base 5: mod_base = OTHER; note = bicyclic nucleic acid (BNA)
  modified_base 13: mod_base = OTHER; note = bicyclic nucleic acid (BNA)
  source 1..20: mol_type = other DNA
tcaaggaagatggcatttct

SEQ ID NO: 12022 - DNA, 20 bp, synthetic construct
  misc_feature 1..20: note = Description of Artificial Sequence: Synthetic Antisense oligonucleotide
  modified_base 1: mod_base = OTHER; note = bicyclic nucleic acid (BNA)
  modified_base 6: mod_base = OTHER; note = bicyclic nucleic acid (BNA)
  modified_base 9: mod_base = OTHER; note = bicyclic nucleic acid (BNA)
  source 1..20: mol_type = other DNA
tcaaggaagatggcatttct

SEQ ID NO: 12023 - DNA, 20 bp, synthetic construct
  misc_feature 1..20: note = Description of Artificial Sequence: Synthetic Antisense oligonucleotide
  modified_base 1: mod_base = OTHER; note = bicyclic nucleic acid (BNA)
  modified_base 13..14: mod_base = OTHER; note = bicyclic nucleic acid (BNA)
  source 1..20: mol_type = other DNA
tcaaggaagatggcatttct

SEQ ID NO: 12024 - DNA, 20 bp, synthetic construct
  misc_feature 1..20: note = Description of Artificial Sequence: Synthetic Antisense oligonucleotide
  modified_base 1: mod_base = OTHER; note = bicyclic nucleic acid (BNA)
  modified_base 6: mod_base = OTHER; note = bicyclic nucleic acid (BNA)
  modified_base 13: mod_base = OTHER; note = bicyclic nucleic acid (BNA)
  source 1..20: mol_type = other DNA
tcaaggaagatggcatttct

SEQ ID NO: 12025 - DNA, 20 bp, synthetic construct
  misc_feature 1..20: note = Description of Artificial Sequence: Synthetic Antisense oligonucleotide
  modified_base 1: mod_base = OTHER; note = bicyclic nucleic acid (BNA)
  modified_base 6: mod_base = OTHER; note = bicyclic nucleic acid (BNA)
  modified_base 19: mod_base = OTHER; note = bicyclic nucleic acid (BNA)
  source 1..20: mol_type = other DNA
tcaaggaagatggcatttct

SEQ ID NO: 12026 - DNA, 20 bp, synthetic construct
  misc_feature 1..20: note = Description of Artificial Sequence: Synthetic Antisense oligonucleotide
  modified_base 1: mod_base = OTHER; note = bicyclic nucleic acid (BNA)
  modified_base 5: mod_base = OTHER; note = bicyclic nucleic acid (BNA)
  modified_base 14: mod_base = OTHER; note = bicyclic nucleic acid (BNA)
  source 1..20: mol_type = other DNA
tcaaggaagatggcatttct

SEQ ID NO: 12027 - DNA, 20 bp, synthetic construct
  misc_feature 1..20: note = Description of Artificial Sequence: Synthetic Antisense oligonucleotide
  modified_base 1: mod_base = OTHER; note = bicyclic nucleic acid (BNA)
  modified_base 12: mod_base = OTHER; note = bicyclic nucleic acid (BNA)
  modified_base 19: mod_base = OTHER; note = bicyclic nucleic acid (BNA)
  source 1..20: mol_type = other DNA
tcaaggaagatggcatttct

SEQ ID NO: 12028 - DNA, 20 bp, synthetic construct
  misc_feature 1..20: note = Description of Artificial Sequence: Synthetic Antisense oligonucleotide
  modified_base 1: mod_base = OTHER; note = bicyclic nucleic acid (BNA)
  modified_base 12: mod_base = OTHER; note = bicyclic nucleic acid (BNA)
  modified_base 14: mod_base = OTHER; note = bicyclic nucleic acid (BNA)
  source 1..20: mol_type = other DNA
tcaaggaagatggcatttct

SEQ ID NO: 12029 - DNA, 20 bp, synthetic construct
  misc_feature 1..20: note = Description of Artificial Sequence: Synthetic Antisense oligonucleotide
  modified_base 1: mod_base = OTHER; note = bicyclic nucleic acid (BNA)
  modified_base 6: mod_base = OTHER; note = bicyclic nucleic acid (BNA)
  modified_base 12: mod_base = OTHER; note = bicyclic nucleic acid (BNA)
  source 1..20: mol_type = other DNA
tcaaggaagatggcatttct

SEQ ID NO: 12030 - DNA, 20 bp, synthetic construct
  misc_feature 1..20: note = Description of Artificial Sequence: Synthetic Antisense oligonucleotide
  modified_base 1: mod_base = OTHER; note = bicyclic nucleic acid (BNA)
  modified_base 5..6: mod_base = OTHER; note = bicyclic nucleic acid (BNA)
  source 1..20: mol_type = other DNA
tcaaggaagatggcatttct

SEQ ID NO: 12031 - DNA, 20 bp, synthetic construct
  misc_feature 1..20: note = Description of Artificial Sequence: Synthetic Antisense oligonucleotide
  modified_base 1: mod_base = OTHER; note = bicyclic nucleic acid (BNA)
  modified_base 9: mod_base = OTHER; note = bicyclic nucleic acid (BNA)
  modified_base 12: mod_base = OTHER; note = bicyclic nucleic acid (BNA)
  source 1..20: mol_type = other DNA
tcaaggaagatggcatttct

SEQ ID NO: 12032 - DNA, 20 bp, synthetic construct
  misc_feature 1..20: note = Description of Artificial Sequence: Synthetic Antisense oligonucleotide
  modified_base 1: mod_base = OTHER; note = bicyclic nucleic acid (BNA)
  modified_base 13: mod_base = OTHER; note = bicyclic nucleic acid (BNA)
  modified_base 19: mod_base = OTHER; note = bicyclic nucleic acid (BNA)
  source 1..20: mol_type = other DNA
tcaaggaagatggcatttct

SEQ ID NO: 12033 - DNA, 20 bp, synthetic construct
  misc_feature 1..20: note = Description of Artificial Sequence: Synthetic Antisense oligonucleotide
  modified_base 1: mod_base = OTHER; note = bicyclic nucleic acid (BNA)
  modified_base 12..13: mod_base = OTHER; note = bicyclic nucleic acid (BNA)
  source 1..20: mol_type = other DNA
tcaaggaagatggcatttct

SEQ ID NO: 12034 - DNA, 20 bp, synthetic construct
  misc_feature 1..20: note = Description of Artificial Sequence: Synthetic Antisense oligonucleotide
  modified_base 1: mod_base = OTHER; note = bicyclic nucleic acid (BNA)
  modified_base 5: mod_base = OTHER; note = bicyclic nucleic acid (BNA)
  modified_base 12: mod_base = OTHER; note = bicyclic nucleic acid (BNA)
  source 1..20: mol_type = other DNA
tcaaggaagatggcatttct

SEQ ID NO: 12035 - DNA, 20 bp, synthetic construct
  misc_feature 1..20: note = Description of Artificial Sequence: Synthetic Antisense oligonucleotide
  modified_base 1: mod_base = OTHER; note = bicyclic nucleic acid (BNA)
  modified_base 9: mod_base = OTHER; note = bicyclic nucleic acid (BNA)
  modified_base 13: mod_base = OTHER; note = bicyclic nucleic acid (BNA)
  source 1..20: mol_type = other DNA
tcaaggaagatggcatttct

SEQ ID NO: 12036 - DNA, 20 bp, synthetic construct
  misc_feature 1..20: note = Description of Artificial Sequence: Synthetic Antisense oligonucleotide
  modified_base 1: mod_base = OTHER; note = bicyclic nucleic acid (BNA)
  modified_base 14: mod_base = OTHER; note = bicyclic nucleic acid (BNA)
  modified_base 19: mod_base = OTHER; note = bicyclic nucleic acid (BNA)
  source 1..20: mol_type = other DNA
tcaaggaagatggcatttct

SEQ ID NO: 12037 - DNA, 20 bp, synthetic construct
  misc_feature 1..20: note = Description of Artificial Sequence: Synthetic Antisense oligonucleotide
  modified_base 1: mod_base = OTHER; note = bicyclic nucleic acid (BNA)
  modified_base 9: mod_base = OTHER; note = bicyclic nucleic acid (BNA)
  modified_base 19: mod_base = OTHER; note = bicyclic nucleic acid (BNA)
  source 1..20: mol_type = other DNA
tcaaggaagatggcatttct

SEQ ID NO: 12038 - DNA, 22 bp, synthetic construct
  misc_feature 1..22: note = Description of Artificial Sequence: Synthetic Antisense oligonucleotide
  modified_base 1: mod_base = OTHER; note = bicyclic nucleic acid (BNA)
  modified_base 9: mod_base = OTHER; note = bicyclic nucleic acid (BNA)
  modified_base 14: mod_base = OTHER; note = bicyclic nucleic acid (BNA)
  source 1..22: mol_type = other DNA
tcaaggaagatggcatttctag

SEQ ID NO: 12039 - DNA, 22 bp, synthetic construct
  misc_feature 1..22: note = Description of Artificial Sequence: Synthetic Antisense oligonucleotide
  modified_base 1: mod_base = OTHER; note = bicyclic nucleic acid (BNA)
  modified_base 5: mod_base = OTHER; note = bicyclic nucleic acid (BNA)
  modified_base 9: mod_base = OTHER; note = bicyclic nucleic acid (BNA)
  source 1..22: mol_type = other DNA
tcaaggaagatggcatttctag

SEQ ID NO: 12040 - DNA, 22 bp, synthetic construct
  misc_feature 1..22: note = Description of Artificial Sequence: Synthetic Antisense oligonucleotide
  modified_base 1: mod_base = OTHER; note = bicyclic nucleic acid (BNA)
  modified_base 5: mod_base = OTHER; note = bicyclic nucleic acid (BNA)
  modified_base 19: mod_base = OTHER; note = bicyclic nucleic acid (BNA)
  source 1..22: mol_type = other DNA
tcaaggaagatggcatttctag

SEQ ID NO: 12041 - DNA, 22 bp, synthetic construct
  misc_feature 1..22: note = Description of Artificial Sequence: Synthetic Antisense oligonucleotide
  modified_base 1: mod_base = OTHER; note = bicyclic nucleic acid (BNA)
  modified_base 6: mod_base = OTHER; note = bicyclic nucleic acid (BNA)
  modified_base 14: mod_base = OTHER; note = bicyclic nucleic acid (BNA)
  source 1..22: mol_type = other DNA
tcaaggaagatggcatttctag

SEQ ID NO: 12042 - DNA, 22 bp, synthetic construct
  misc_feature 1..22: note = Description of Artificial Sequence: Synthetic Antisense oligonucleotide
  modified_base 1: mod_base = OTHER; note = bicyclic nucleic acid (BNA)
  modified_base 5: mod_base = OTHER; note = bicyclic nucleic acid (BNA)
  modified_base 13: mod_base = OTHER; note = bicyclic nucleic acid (BNA)
  source 1..22: mol_type = other DNA
tcaaggaagatggcatttctag

SEQ ID NO: 12043 - DNA, 22 bp, synthetic construct
  misc_feature 1..22: note = Description of Artificial Sequence: Synthetic Antisense oligonucleotide
  modified_base 1: mod_base = OTHER; note = bicyclic nucleic acid (BNA)
  modified_base 6: mod_base = OTHER; note = bicyclic nucleic acid (BNA)
  modified_base 9: mod_base = OTHER; note = bicyclic nucleic acid (BNA)
  source 1..22: mol_type = other DNA
tcaaggaagatggcatttctag

SEQ ID NO: 12044 - DNA, 22 bp, synthetic construct
  misc_feature 1..22: note = Description of Artificial Sequence: Synthetic Antisense oligonucleotide
  modified_base 1: mod_base = OTHER; note = bicyclic nucleic acid (BNA)
  modified_base 13..14: mod_base = OTHER; note = bicyclic nucleic acid (BNA)
  source 1..22: mol_type = other DNA
tcaaggaagatggcatttctag

SEQ ID NO: 12045 - DNA, 22 bp, synthetic construct
  misc_feature 1..22: note = Description of Artificial Sequence: Synthetic Antisense oligonucleotide
  modified_base 1: mod_base = OTHER; note = bicyclic nucleic acid (BNA)
  modified_base 6: mod_base = OTHER; note = bicyclic nucleic acid (BNA)
  modified_base 13: mod_base = OTHER; note = bicyclic nucleic acid (BNA)
  source 1..22: mol_type = other DNA
tcaaggaagatggcatttctag

SEQ ID NO: 12046 - DNA, 22 bp, synthetic construct
  misc_feature 1..22: note = Description of Artificial Sequence: Synthetic Antisense oligonucleotide
  modified_base 1: mod_base = OTHER; note = bicyclic nucleic acid (BNA)
  modified_base 6: mod_base = OTHER; note = bicyclic nucleic acid (BNA)
  modified_base 19: mod_base = OTHER; note = bicyclic nucleic acid (BNA)
  source 1..22: mol_type = other DNA
tcaaggaagatggcatttctag

SEQ ID NO: 12047 - DNA, 22 bp, synthetic construct
  misc_feature 1..22: note = Description of Artificial Sequence: Synthetic Antisense oligonucleotide
  modified_base 1: mod_base = OTHER; note = bicyclic nucleic acid (BNA)
  modified_base 5: mod_base = OTHER; note = bicyclic nucleic acid (BNA)
  modified_base 14: mod_base = OTHER; note = bicyclic nucleic acid (BNA)
  source 1..22: mol_type = other DNA
tcaaggaagatggcatttctag

SEQ ID NO: 12048 - DNA, 22 bp, synthetic construct
  misc_feature 1..22: note = Description of Artificial Sequence: Synthetic Antisense oligonucleotide
  modified_base 1: mod_base = OTHER; note = bicyclic nucleic acid (BNA)
  modified_base 12: mod_base = OTHER; note = bicyclic nucleic acid (BNA)
  modified_base 19: mod_base = OTHER; note = bicyclic nucleic acid (BNA)
  source 1..22: mol_type = other DNA
tcaaggaagatggcatttctag

SEQ ID NO: 12049 - DNA, 22 bp, synthetic construct
  misc_feature 1..22: note = Description of Artificial Sequence: Synthetic Antisense oligonucleotide
  modified_base 1: mod_base = OTHER; note = bicyclic nucleic acid (BNA)
  modified_base 12: mod_base = OTHER; note = bicyclic nucleic acid (BNA)
  modified_base 14: mod_base = OTHER; note = bicyclic nucleic acid (BNA)
  source 1..22: mol_type = other DNA
tcaaggaagatggcatttctag

SEQ ID NO: 12050 - DNA, 22 bp, synthetic construct
  misc_feature 1..22: note = Description of Artificial Sequence: Synthetic Antisense oligonucleotide
  modified_base 1: mod_base = OTHER; note = bicyclic nucleic acid (BNA)
  modified_base 6: mod_base = OTHER; note = bicyclic nucleic acid (BNA)
  modified_base 12: mod_base = OTHER; note = bicyclic nucleic acid (BNA)
  source 1..22: mol_type = other DNA
tcaaggaagatggcatttctag

SEQ ID NO: 12051 - DNA, 22 bp, synthetic construct
  misc_feature 1..22: note = Description of Artificial Sequence: Synthetic Antisense oligonucleotide
  modified_base 1: mod_base = OTHER; note = bicyclic nucleic acid (BNA)
  modified_base 5..6: mod_base = OTHER; note = bicyclic nucleic acid (BNA)
  source 1..22: mol_type = other DNA
tcaaggaagatggcatttctag

SEQ ID NO: 12052 - DNA, 22 bp, synthetic construct
  misc_feature 1..22: note = Description of Artificial Sequence: Synthetic Antisense oligonucleotide
  modified_base 1: mod_base = OTHER; note = bicyclic nucleic acid (BNA)
  modified_base 9: mod_base = OTHER; note = bicyclic nucleic acid (BNA)
  modified_base 12: mod_base = OTHER; note = bicyclic nucleic acid (BNA)
  source 1..22: mol_type = other DNA
tcaaggaagatggcatttctag

SEQ ID NO: 12053 - DNA, 22 bp, synthetic construct
  misc_feature 1..22: note = Description of Artificial Sequence: Synthetic Antisense oligonucleotide
  modified_base 1: mod_base = OTHER; note = bicyclic nucleic acid (BNA)
  modified_base 13: mod_base = OTHER; note = bicyclic nucleic acid (BNA)
  modified_base 19: mod_base = OTHER; note = bicyclic nucleic acid (BNA)
  source 1..22: mol_type = other DNA
tcaaggaagatggcatttctag

SEQ ID NO: 12054 - DNA, 22 bp, synthetic construct
  misc_feature 1..22: note = Description of Artificial Sequence: Synthetic Antisense oligonucleotide
  modified_base 1: mod_base = OTHER; note = bicyclic nucleic acid (BNA)
  modified_base 12..13: mod_base = OTHER; note = bicyclic nucleic acid (BNA)
  source 1..22: mol_type = other DNA
tcaaggaagatggcatttctag

SEQ ID NO: 12055 - DNA, 22 bp, synthetic construct
  misc_feature 1..22: note = Description of Artificial Sequence: Synthetic Antisense oligonucleotide
  modified_base 1: mod_base = OTHER; note = bicyclic nucleic acid (BNA)
  modified_base 5: mod_base = OTHER; note = bicyclic nucleic acid (BNA)
  modified_base 12: mod_base = OTHER; note = bicyclic nucleic acid (BNA)
  source 1..22: mol_type = other DNA
tcaaggaagatggcatttctag

SEQ ID NO: 12056 - DNA, 22 bp, synthetic construct
  misc_feature 1..22: note = Description of Artificial Sequence: Synthetic Antisense oligonucleotide
  modified_base 1: mod_base = OTHER; note = bicyclic nucleic acid (BNA)
  modified_base 9: mod_base = OTHER; note = bicyclic nucleic acid (BNA)
  modified_base 13: mod_base = OTHER; note = bicyclic nucleic acid (BNA)
  source 1..22: mol_type = other DNA
tcaaggaagatggcatttctag

SEQ ID NO: 12057 - DNA, 22 bp, synthetic construct
  misc_feature 1..22: note = Description of Artificial Sequence: Synthetic Antisense oligonucleotide
  modified_base 1: mod_base = OTHER; note = bicyclic nucleic acid (BNA)
  modified_base 14: mod_base = OTHER; note = bicyclic nucleic acid (BNA)
  modified_base 19: mod_base = OTHER; note = bicyclic nucleic acid (BNA)
  source 1..22: mol_type = other DNA
tcaaggaagatggcatttctag

SEQ ID NO: 12058 - DNA, 22 bp, synthetic construct
  misc_feature 1..22: note = Description of Artificial Sequence: Synthetic Antisense oligonucleotide
  modified_base 1: mod_base = OTHER; note = bicyclic nucleic acid (BNA)
  modified_base 9: mod_base = OTHER; note = bicyclic nucleic acid (BNA)
  modified_base 19: mod_base = OTHER; note = bicyclic nucleic acid (BNA)
  source 1..22: mol_type = other DNA
tcaaggaagatggcatttctag

SEQ ID NO: 12059 - DNA, 18 bp, synthetic construct
  misc_feature 1..18: note = Description of Artificial Sequence: Synthetic Antisense oligonucleotide
  modified_base 1: mod_base = OTHER; note = bicyclic nucleic acid (BNA)
  modified_base 9: mod_base = OTHER; note = bicyclic nucleic acid (BNA)
  modified_base 9: mod_base = OTHER; note = 5-methyl
  modified_base 13..14: mod_base = OTHER; note = 5-methyl
  modified_base 18: mod_base = OTHER; note = 5-methyl
  source 1..18: mol_type = other DNA
ggtaagttctgtccaagc

SEQ ID NO: 12060 - DNA, 18 bp, synthetic construct
  misc_feature 1..18: note = Description of Artificial Sequence: Synthetic Antisense oligonucleotide
  modified_base 1: mod_base = OTHER; note = bicyclic nucleic acid (BNA)
  modified_base 11: mod_base = OTHER; note = bicyclic nucleic acid (BNA)
  modified_base 9: mod_base = OTHER; note = 5-methyl
  modified_base 13..14: mod_base = OTHER; note = 5-methyl
  modified_base 18: mod_base = OTHER; note = 5-methyl
  source 1..18: mol_type = other DNA
ggtaagttctgtccaagc

SEQ ID NO: 12061 - DNA, 18 bp, synthetic construct
  misc_feature 1..18: note = Description of Artificial Sequence: Synthetic Antisense oligonucleotide
  modified_base 1: mod_base = OTHER; note = bicyclic nucleic acid (BNA)
  modified_base 6: mod_base = OTHER; note = bicyclic nucleic acid (BNA)
  modified_base 9: mod_base = OTHER; note = 5-methyl
  modified_base 13..14: mod_base = OTHER; note = 5-methyl
  modified_base 18: mod_base = OTHER; note = 5-methyl
  source 1..18: mol_type = other DNA
ggtaagttctgtccaagc

SEQ ID NO: 12062 - DNA, 18 bp, synthetic construct
  misc_feature 1..18: note = Description of Artificial Sequence: Synthetic Antisense oligonucleotide
  modified_base 1: mod_base = OTHER; note = bicyclic nucleic acid (BNA)
  modified_base 17: mod_base = OTHER; note = bicyclic nucleic acid (BNA)
  modified_base 9: mod_base = OTHER; note = 5-methyl
  modified_base 13..14: mod_base = OTHER; note = 5-methyl
  modified_base 18: mod_base = OTHER; note = 5-methyl
  source 1..18: mol_type = other DNA
ggtaagttctgtccaagc

SEQ ID NO: 12063 - DNA, 18 bp, synthetic construct
  misc_feature 1..18: note = Description of Artificial Sequence: Synthetic Antisense oligonucleotide
  modified_base 1: mod_base = OTHER; note = bicyclic nucleic acid (BNA)
  modified_base 13: mod_base = OTHER; note = bicyclic nucleic acid (BNA)
  modified_base 9: mod_base = OTHER; note = 5-methyl
  modified_base 13..14: mod_base = OTHER; note = 5-methyl
  modified_base 18: mod_base = OTHER; note = 5-methyl
  source 1..18: mol_type = other DNA
ggtaagttctgtccaagc

SEQ ID NO: 12064 - DNA, 18 bp, synthetic construct
  misc_feature 1..18: note = Description of Artificial Sequence: Synthetic Antisense oligonucleotide
  modified_base 1: mod_base = OTHER; note = bicyclic nucleic acid (BNA)
  modified_base 14: mod_base = OTHER; note = bicyclic nucleic acid (BNA)
  modified_base 9: mod_base = OTHER; note = 5-methyl
  modified_base 13..14: mod_base = OTHER; note = 5-methyl
  modified_base 18: mod_base = OTHER; note = 5-methyl
  source 1..18: mol_type = other DNA
ggtaagttctgtccaagc

SEQ ID NO: 12065 - DNA, 18 bp, synthetic construct
  misc_feature 1..18: note = Description of Artificial Sequence: Synthetic Antisense oligonucleotide
  modified_base 1: mod_base = OTHER; note = bicyclic nucleic acid (BNA)
  modified_base 16: mod_base = OTHER; note = bicyclic nucleic acid (BNA)
  modified_base 8: mod_base = OTHER; note = 5-methyl
  modified_base 12..13: mod_base = OTHER; note = 5-methyl
  modified_base 17..18: mod_base = OTHER; note = 5-methyl
  source 1..18: mol_type = other DNA
gtaagttctgtccaagcc

SEQ ID NO: 12066 - DNA, 18 bp, synthetic construct
  misc_feature 1..18: note = Description of Artificial Sequence: Synthetic Antisense oligonucleotide
  modified_base 1: mod_base = OTHER; note = bicyclic nucleic acid (BNA)
  modified_base 10: mod_base = OTHER; note = bicyclic nucleic acid (BNA)
  modified_base 8: mod_base = OTHER; note = 5-methyl
  modified_base 12..13: mod_base = OTHER; note = 5-methyl
  modified_base 17..18: mod_base = OTHER; note = 5-methyl
  source 1..18: mol_type = other DNA
gtaagttctgtccaagcc

SEQ ID NO: 12067 - DNA, 18 bp, synthetic construct
  misc_feature 1..18: note = Description of Artificial Sequence: Synthetic Antisense oligonucleotide
  modified_base 1: mod_base = OTHER; note = bicyclic nucleic acid (BNA)
  modified_base 5: mod_base = OTHER; note = bicyclic nucleic acid (BNA)
  modified_base 8: mod_base = OTHER; note = 5-methyl
  modified_base 12..13: mod_base = OTHER; note = 5-methyl
  modified_base 17..18: mod_base = OTHER; note = 5-methyl
  source 1..18: mol_type = other DNA
gtaagttctgtccaagcc

SEQ ID NO: 12068 - DNA, 18 bp, synthetic construct
  misc_feature 1..18: note = Description of Artificial Sequence: Synthetic Antisense oligonucleotide
  modified_base 1: mod_base = OTHER; note = bicyclic nucleic acid (BNA)
  modified_base 17: mod_base = OTHER; note = bicyclic nucleic acid (BNA)
  modified_base 8: mod_base = OTHER; note = 5-methyl
  modified_base 12..13: mod_base = OTHER; note = 5-methyl
  modified_base 17..18: mod_base = OTHER; note = 5-methyl
  source 1..18: mol_type = other DNA
gtaagttctgtccaagcc

SEQ ID NO: 12069 - DNA, 18 bp, synthetic construct
  misc_feature 1..18: note = Description of Artificial Sequence: Synthetic Antisense oligonucleotide
  modified_base 1: mod_base = OTHER; note = bicyclic nucleic acid (BNA)
  modified_base 12: mod_base = OTHER; note = bicyclic nucleic acid (BNA)
  modified_base 8: mod_base = OTHER; note = 5-methyl
  modified_base 12..13: mod_base = OTHER; note = 5-methyl
  modified_base 17..18: mod_base = OTHER; note = 5-methyl
  source 1..18: mol_type = other DNA
gtaagttctgtccaagcc

SEQ ID NO: 12070 - DNA, 18 bp, synthetic construct
  misc_feature 1..18: note = Description of Artificial Sequence: Synthetic Antisense oligonucleotide
  modified_base 1: mod_base = OTHER; note = bicyclic nucleic acid (BNA)
  modified_base 13: mod_base = OTHER; note = bicyclic nucleic acid (BNA)
  modified_base 8: mod_base = OTHER; note = 5-methyl
  modified_base 12..13: mod_base = OTHER; note = 5-methyl
  modified_base 17..18: mod_base = OTHER; note = 5-methyl
  source 1..18: mol_type = other DNA
gtaagttctgtccaagcc

SEQ ID NO: 12071 - DNA, 18 bp, synthetic construct
  misc_feature 1..18: note = Description of Artificial Sequence: Synthetic Antisense oligonucleotide
  modified_base 1: mod_base = OTHER; note = bicyclic nucleic acid (BNA)
  modified_base 8: mod_base = OTHER; note = bicyclic nucleic acid (BNA)
  modified_base 8: mod_base = OTHER; note = 5-methyl
  modified_base 12..13: mod_base = OTHER; note = 5-methyl
  modified_base 17..18: mod_base = OTHER; note = 5-methyl
  source 1..18: mol_type = other DNA
gtaagttctgtccaagcc

SEQ ID NO: 12072 - DNA, 18 bp, synthetic construct
  misc_feature 1..18: note = Description of Artificial Sequence: Synthetic Antisense oligonucleotide
  modified_base 1: mod_base = OTHER; note = bicyclic nucleic acid (BNA)
  modified_base 4: mod_base = OTHER; note = bicyclic nucleic acid (BNA)
  modified_base 4: mod_base = OTHER; note = 5-methyl
  modified_base 13: mod_base = OTHER; note = 5-methyl
  modified_base 17..18: mod_base = OTHER; note = 5-methyl
  source 1..18: mol_type = other DNA
agtcggtaagttctgtcc

SEQ ID NO: 12073 - DNA, 18 bp, synthetic construct
  misc_feature 1..18: note = Description of Artificial Sequence: Synthetic Antisense oligonucleotide
  modified_base 1: mod_base = OTHER; note = bicyclic nucleic acid (BNA)
  modified_base 10: mod_base = OTHER; note = bicyclic nucleic acid (BNA)
  modified_base 4: mod_base = OTHER; note = 5-methyl
  modified_base 13: mod_base = OTHER; note = 5-methyl
  modified_base 17..18: mod_base = OTHER; note = 5-methyl
  source 1..18: mol_type = other DNA
agtcggtaagttctgtcc

SEQ ID NO: 12074 - DNA, 18 bp, synthetic construct
  misc_feature 1..18: note = Description of Artificial Sequence: Synthetic Antisense oligonucleotide
  modified_base 1: mod_base = OTHER; note = bicyclic nucleic acid (BNA)
  modified_base 5: mod_base = OTHER; note = bicyclic nucleic acid (BNA)
  modified_base 4: mod_base = OTHER; note = 5-methyl
  modified_base 13: mod_base = OTHER; note = 5-methyl
  modified_base 17..18: mod_base = OTHER; note = 5-methyl
  source 1..18: mol_type = other DNA
agtcggtaagttctgtcc

SEQ ID NO: 12075 - DNA, 18 bp, synthetic construct
  misc_feature 1..18: note = Description of Artificial Sequence: Synthetic Antisense oligonucleotide
  modified_base 1: mod_base = OTHER; note = bicyclic nucleic acid (BNA)
  modified_base 6: mod_base = OTHER; note = bicyclic nucleic acid (BNA)
  modified_base 4: mod_base = OTHER; note = 5-methyl
  modified_base 13: mod_base = OTHER; note = 5-methyl
  modified_base 17..18: mod_base = OTHER; note = 5-methyl
  source 1..18: mol_type = other DNA
agtcggtaagttctgtcc

SEQ ID NO: 12076 - DNA, 18 bp, synthetic construct
  misc_feature 1..18: note = Description of Artificial Sequence: Synthetic Antisense oligonucleotide
  modified_base 1: mod_base = OTHER; note = bicyclic nucleic acid (BNA)
  modified_base 17: mod_base = OTHER; note = bicyclic nucleic acid (BNA)
  modified_base 4: mod_base = OTHER; note = 5-methyl
  modified_base 13: mod_base = OTHER; note = 5-methyl
  modified_base 17..18: mod_base = OTHER; note = 5-methyl
  source 1..18: mol_type = other DNA
agtcggtaagttctgtcc

SEQ ID NO: 12077 - DNA, 18 bp, synthetic construct
  misc_feature 1..18: note = Description of Artificial Sequence: Synthetic Antisense oligonucleotide
  modified_base 1: mod_base = OTHER; note = bicyclic nucleic acid (BNA)
  modified_base 13: mod_base = OTHER; note = bicyclic nucleic acid (BNA)
  modified_base 4: mod_base = OTHER; note = 5-methyl
  modified_base 13: mod_base = OTHER; note = 5-methyl
  modified_base 17..18: mod_base = OTHER; note = 5-methyl
  source 1..18: mol_type = other DNA
agtcggtaagttctgtcc

SEQ ID NO: 12078 - DNA, 18 bp, synthetic construct
  misc_feature 1..18: note = Description of Artificial Sequence: Synthetic Antisense oligonucleotide
  modified_base 1: mod_base = OTHER; note = bicyclic nucleic acid (BNA)
  modified_base 15: mod_base = OTHER; note = bicyclic nucleic acid (BNA)
  modified_base 4: mod_base = OTHER; note = 5-methyl
  modified_base 13: mod_base = OTHER; note = 5-methyl
  modified_base 17..18: mod_base = OTHER; note = 5-methyl
  source 1..18: mol_type = other DNA
agtcggtaagttctgtcc

SEQ ID NO: 12079 - DNA, 18 bp, synthetic construct
  misc_feature 1..18: note = Description of Artificial Sequence: Synthetic Antisense oligonucleotide
  modified_base 1: mod_base = OTHER; note = 5-methyl
  modified_base 5..6: mod_base = OTHER; note = 5-methyl
  modified_base 10..12: mod_base = OTHER; note = 5-methyl
  modified_base 1: mod_base = OTHER; note = bicyclic nucleic acid (BNA)
  modified_base 3: mod_base = OTHER; note = bicyclic nucleic acid (BNA)
  source 1..18: mol_type = other DNA
ctgtccaagcccggttga

SEQ ID NO: 12080 - DNA, 18 bp, synthetic construct
  misc_feature 1..18: note = Description of Artificial Sequence: Synthetic Antisense oligonucleotide
  modified_base 1: mod_base = OTHER; note = 5-methyl
  modified_base 5..6: mod_base = OTHER; note = 5-methyl
  modified_base 10..12: mod_base = OTHER; note = 5-methyl
  modified_base 1: mod_base = OTHER; note = bicyclic nucleic acid (BNA)
  modified_base 9: mod_base = OTHER; note = bicyclic nucleic acid (BNA)
  source 1..18: mol_type = other DNA
ctgtccaagcccggttga

SEQ ID NO: 12081 - DNA, 18 bp, synthetic construct
  misc_feature 1..18: note = Description of Artificial Sequence: Synthetic Antisense oligonucleotide
  modified_base 1: mod_base = OTHER; note = 5-methyl
  modified_base 5..6: mod_base = OTHER; note = 5-methyl
  modified_base 10..12: mod_base = OTHER; note = 5-methyl
  modified_base 1: mod_base = OTHER; note = bicyclic nucleic acid (BNA)
  modified_base 10: mod_base = OTHER; note = bicyclic nucleic acid (BNA)
  source 1..18: mol_type = other DNA
ctgtccaagcccggttga

SEQ ID NO: 12082 - DNA, 18 bp, synthetic construct
  misc_feature 1..18: note = Description of Artificial Sequence: Synthetic Antisense oligonucleotide
  modified_base 1: mod_base = OTHER; note = 5-methyl
  modified_base 5..6: mod_base = OTHER; note = 5-methyl
  modified_base 10..12: mod_base = OTHER; note = 5-methyl
  modified_base 1: mod_base = OTHER; note = bicyclic nucleic acid (BNA)
  modified_base 5: mod_base = OTHER; note = bicyclic nucleic acid (BNA)
  source 1..18: mol_type = other DNA
ctgtccaagcccggttga

SEQ ID NO: 12083 - DNA, 18 bp, synthetic construct
  misc_feature 1..18: note = Description of Artificial Sequence: Synthetic Antisense oligonucleotide
  modified_base 1: mod_base = OTHER; note = 5-methyl
  modified_base 5..6: mod_base = OTHER; note = 5-methyl
  modified_base 10..12: mod_base = OTHER; note = 5-methyl
  modified_base 1: mod_base = OTHER; note = bicyclic nucleic acid (BNA)
  modified_base 11: mod_base = OTHER; note = bicyclic nucleic acid (BNA)
  source 1..18: mol_type = other DNA
ctgtccaagcccggttga

SEQ ID NO: 12084 - DNA, 18 bp, synthetic construct
  misc_feature 1..18: note = Description of Artificial Sequence: Synthetic Antisense oligonucleotide
  modified_base 1: mod_base = OTHER; note = 5-methyl
  modified_base 5..6: mod_base = OTHER; note = 5-methyl
  modified_base 10..12: mod_base = OTHER; note = 5-methyl
  modified_base 1: mod_base = OTHER; note = bicyclic nucleic acid (BNA)
  modified_base 6: mod_base = OTHER; note = bicyclic nucleic acid (BNA)
  source 1..18: mol_type = other DNA
ctgtccaagcccggttga

SEQ ID NO: 12085 - DNA, 18 bp, synthetic construct
  misc_feature 1..18: note = Description of Artificial Sequence: Synthetic Antisense oligonucleotide
  modified_base 1: mod_base = OTHER; note = 5-methyl
  modified_base 5..6: mod_base = OTHER; note = 5-methyl
  modified_base 10..12: mod_base = OTHER; note = 5-methyl
  modified_base 1: mod_base = OTHER; note = bicyclic nucleic acid (BNA)
  modified_base 17: mod_base = OTHER; note = bicyclic nucleic acid (BNA)
  source 1..18: mol_type = other DNA
ctgtccaagcccggttga

SEQ ID NO: 12086 - DNA, 18 bp, synthetic construct
  misc_feature 1..18: note = Description of Artificial Sequence: Synthetic Antisense oligonucleotide
  modified_base 1: mod_base = OTHER; note = 5-methyl
  modified_base 5..6: mod_base = OTHER; note = 5-methyl
  modified_base 10..12: mod_base = OTHER; note = 5-methyl
  modified_base 1: mod_base = OTHER; note = bicyclic nucleic acid (BNA)
  modified_base 12: mod_base = OTHER; note = bicyclic nucleic acid (BNA)
  source 1..18: mol_type = other DNA
ctgtccaagcccggttga

SEQ ID NO: 12087 - DNA, 18 bp, synthetic construct
  misc_feature 1..18: note = Description of Artificial Sequence: Synthetic Antisense oligonucleotide
  modified_base 1: mod_base = OTHER; note = 5-methyl
  modified_base 5..6: mod_base = OTHER; note = 5-methyl
  modified_base 10..12: mod_base = OTHER; note = 5-methyl
  modified_base 1: mod_base = OTHER; note = bicyclic nucleic acid (BNA)
  modified_base 13: mod_base = OTHER; note = bicyclic nucleic acid (BNA)
  source 1..18: mol_type = other DNA
ctgtccaagcccggttga

SEQ ID NO: 12088 - DNA, 18 bp, synthetic construct
  misc_feature 1..18: note = Description of Artificial Sequence: Synthetic Antisense oligonucleotide
  modified_base 1: mod_base = OTHER; note = 5-methyl
  modified_base 5..6: mod_base = OTHER; note = 5-methyl
  modified_base 10..12: mod_base = OTHER; note = 5-methyl
  modified_base 1: mod_base = OTHER; note = bicyclic nucleic acid (BNA)
  modified_base 14: mod_base = OTHER; note = bicyclic nucleic acid (BNA)
  source 1..18: mol_type = other DNA
ctgtccaagcccggttga

SEQ ID NO: 12089 - DNA, 18 bp, synthetic construct
  misc_feature 1..18: note = Description of Artificial Sequence: Synthetic Antisense oligonucleotide
  modified_base 1: mod_base = OTHER; note = bicyclic nucleic acid (BNA)
  modified_base 6: mod_base = OTHER; note = bicyclic nucleic acid (BNA)
  modified_base 11: mod_base = OTHER; note = bicyclic nucleic acid (BNA)
  modified_base 9: mod_base = OTHER; note = 5-methyl
  modified_base 13..14: mod_base = OTHER; note = 5-methyl
  modified_base 18: mod_base = OTHER; note = 5-methyl
  source 1..18: mol_type = other DNA
ggtaagttctgtccaagc

SEQ ID NO: 12090 - DNA, 18 bp, synthetic construct
  misc_feature 1..18: note = Description of Artificial Sequence: Synthetic Antisense oligonucleotide
  modified_base 1: mod_base = OTHER; note = bicyclic nucleic acid (BNA)
  modified_base 9: mod_base = OTHER; note = bicyclic nucleic acid (BNA)
  modified_base 14: mod_base = OTHER; note = bicyclic nucleic acid (BNA)
  modified_base 9: mod_base = OTHER; note = 5-methyl
  modified_base 13..14: mod_base = OTHER; note = 5-methyl
  modified_base 18: mod_base = OTHER; note = 5-methyl
  source 1..18: mol_type = other DNA
ggtaagttctgtccaagc

SEQ ID NO: 12091 - DNA, 18 bp, synthetic construct
  misc_feature 1..18: note = Description of Artificial Sequence: Synthetic Antisense oligonucleotide
  modified_base 1: mod_base = OTHER; note = bicyclic nucleic acid (BNA)
  modified_base 6: mod_base = OTHER; note = bicyclic nucleic acid (BNA)
  modified_base 17: mod_base = OTHER; note = bicyclic nucleic acid (BNA)
  modified_base 9: mod_base = OTHER; note = 5-methyl
  modified_base 13..14: mod_base = OTHER; note = 5-methyl
  modified_base 18: mod_base = OTHER; note = 5-methyl
  source 1..18: mol_type = other DNA
ggtaagttctgtccaagc

SEQ ID NO: 12092 - DNA, 18 bp, synthetic construct
  misc_feature 1..18: note = Description of Artificial Sequence: Synthetic Antisense oligonucleotide
  modified_base 1: mod_base = OTHER; note = bicyclic nucleic acid (BNA)
  modified_base 9: mod_base = OTHER; note = bicyclic nucleic acid (BNA)
  modified_base 13: mod_base = OTHER; note = bicyclic nucleic acid (BNA)
  modified_base 9: mod_base = OTHER; note = 5-methyl
  modified_base 13..14: mod_base = OTHER; note = 5-methyl
  modified_base 18: mod_base = OTHER; note = 5-methyl
  source 1..18: mol_type = other DNA
ggtaagttctgtccaagc

SEQ ID NO: 12093 - DNA, 18 bp, synthetic construct
  misc_feature 1..18: note = Description of Artificial Sequence: Synthetic Antisense oligonucleotide
  modified_base 1: mod_base = OTHER; note = bicyclic nucleic acid (BNA)
  modified_base 13..14: mod_base = OTHER; note = bicyclic nucleic acid (BNA)
  modified_base 9: mod_base = OTHER; note = 5-methyl
  modified_base 13..14: mod_base = OTHER; note = 5-methyl
  modified_base 18: mod_base = OTHER; note = 5-methyl
  source 1..18: mol_type = other DNA
ggtaagttctgtccaagc

SEQ ID NO: 12094 - DNA, 18 bp, synthetic construct
  misc_feature 1..18: note = Description of Artificial Sequence: Synthetic Antisense oligonucleotide
  modified_base 1: mod_base = OTHER; note = bicyclic nucleic acid (BNA)
  modified_base 11: mod_base = OTHER; note = bicyclic nucleic acid (BNA)
  modified_base 17: mod_base = OTHER; note = bicyclic nucleic acid (BNA)
  modified_base 9: mod_base = OTHER; note = 5-methyl
  modified_base 13..14: mod_base = OTHER; note = 5-methyl
  modified_base 18: mod_base = OTHER; note = 5-methyl
  source 1..18: mol_type = other DNA
ggtaagttctgtccaagc

SEQ ID NO: 12095 - DNA, 18 bp, synthetic construct
  misc_feature 1..18: note = Description of Artificial Sequence: Synthetic Antisense oligonucleotide
  modified_base 1: mod_base = OTHER; note = bicyclic nucleic acid (BNA)
  modified_base 11: mod_base = OTHER; note = bicyclic nucleic acid (BNA)
  modified_base 14: mod_base = OTHER; note = bicyclic nucleic acid (BNA)
  modified_base 9: mod_base = OTHER; note = 5-methyl
  modified_base 13..14: mod_base = OTHER; note = 5-methyl
  modified_base 18: mod_base = OTHER; note = 5-methyl
  source 1..18: mol_type = other DNA
ggtaagttctgtccaagc

SEQ ID NO: 12096 - DNA, 18 bp, synthetic construct
  misc_feature 1..18: note = Description of Artificial Sequence: Synthetic Antisense oligonucleotide
  modified_base 1: mod_base = OTHER; note = bicyclic nucleic acid (BNA)
  modified_base 6: mod_base = OTHER; note = bicyclic nucleic acid (BNA)
  modified_base 13: mod_base = OTHER; note = bicyclic nucleic acid (BNA)
  modified_base 9: mod_base = OTHER; note = 5-methyl
  modified_base 13..14: mod_base = OTHER; note = 5-methyl
  modified_base 18: mod_base = OTHER; note = 5-methyl
  source 1..18: mol_type = other DNA
ggtaagttctgtccaagc

SEQ ID NO: 12097 - DNA, 18 bp, synthetic construct
  misc_feature 1..18: note = Description of Artificial Sequence: Synthetic Antisense oligonucleotide
  modified_base 1: mod_base = OTHER; note = bicyclic nucleic acid (BNA)
  modified_base 6: mod_base = OTHER; note = bicyclic nucleic acid (BNA)
  modified_base 14: mod_base = OTHER; note = bicyclic nucleic acid (BNA)
  modified_base 9: mod_base = OTHER; note = 5-methyl
  modified_base 13..14: mod_base = OTHER; note = 5-methyl
  modified_base 18: mod_base = OTHER; note = 5-methyl
  source 1..18: mol_type = other DNA
ggtaagttctgtccaagc

SEQ ID NO: 12098 - DNA, 18 bp, synthetic construct
  misc_feature 1..18: note = Description of Artificial Sequence: Synthetic Antisense oligonucleotide
  modified_base 1: mod_base = OTHER; note = bicyclic nucleic acid (BNA)
  modified_base 14: mod_base = OTHER; note = bicyclic nucleic acid (BNA)
  modified_base 17: mod_base = OTHER; note = bicyclic nucleic acid (BNA)
  modified_base 9: mod_base = OTHER; note = 5-methyl
  modified_base 13..14: mod_base = OTHER; note = 5-methyl
  modified_base 18: mod_base = OTHER; note = 5-methyl
  source 1..18: mol_type = other DNA
ggtaagttctgtccaagc

SEQ ID NO: 12099 - DNA, 18 bp, synthetic construct
  misc_feature 1..18: note = Description of Artificial Sequence: Synthetic Antisense oligonucleotide
  modified_base 1: mod_base = OTHER; note = bicyclic nucleic acid (BNA)
  modified_base 9: mod_base = OTHER; note = bicyclic nucleic acid (BNA)
  modified_base 11: mod_base = OTHER; note = bicyclic nucleic acid (BNA)
  modified_base 9: mod_base = OTHER; note = 5-methyl
  modified_base 13..14: mod_base = OTHER; note = 5-methyl
  modified_base 18: mod_base = OTHER; note = 5-methyl
  source 1..18: mol_type = other DNA
ggtaagttctgtccaagc

SEQ ID NO: 12100 - DNA, 18 bp, synthetic construct
  misc_feature 1..18: note = Description of Artificial Sequence: Synthetic Antisense oligonucleotide
  modified_base 1: mod_base = OTHER; note = bicyclic nucleic acid (BNA)
  modified_base 11: mod_base = OTHER; note = bicyclic nucleic acid (BNA)
  modified_base 13: mod_base = OTHER; note = bicyclic nucleic acid (BNA)
  modified_base 9: mod_base = OTHER; note = 5-methyl
  modified_base 13..14: mod_base = OTHER; note = 5-methyl
  modified_base 18: mod_base = OTHER; note = 5-methyl
  source 1..18: mol_type = other DNA
ggtaagttctgtccaagc

SEQ ID NO: 12101 - DNA, 18 bp, synthetic construct
  misc_feature 1..18: note = Description of Artificial Sequence: Synthetic Antisense oligonucleotide
  modified_base 1: mod_base = OTHER; note = bicyclic nucleic acid (BNA)
  modified_base 13: mod_base = OTHER; note = bicyclic nucleic acid (BNA)
  modified_base 17: mod_base = OTHER; note = bicyclic nucleic acid (BNA)
  modified_base 9: mod_base = OTHER; note = 5-methyl
  modified_base 13..14: mod_base = OTHER; note = 5-methyl
  modified_base 18: mod_base = OTHER; note = 5-methyl
  source 1..18: mol_type = other DNA
ggtaagttctgtccaagc

SEQ ID NO: 12102 - DNA, 18 bp, synthetic construct
  misc_feature 1..18: note = Description of Artificial Sequence: Synthetic Antisense oligonucleotide
  modified_base 1: mod_base = OTHER; note = bicyclic nucleic acid (BNA)
  modified_base 9: mod_base = OTHER; note = bicyclic nucleic acid (BNA)
  modified_base 17: mod_base = OTHER; note = bicyclic nucleic acid (BNA)
  modified_base 9: mod_base = OTHER; note = 5-methyl
  modified_base 13..14: mod_base = OTHER; note = 5-methyl
  modified_base 18: mod_base = OTHER; note = 5-methyl
  source 1..18: mol_type = other DNA
ggtaagttctgtccaagc

SEQ ID NO: 12103 - DNA, 18 bp, synthetic construct
  misc_feature 1..18: note = Description of Artificial Sequence: Synthetic Antisense oligonucleotide
  modified_base 1: mod_base = OTHER; note = bicyclic nucleic acid (BNA)
  modified_base 6: mod_base = OTHER; note = bicyclic nucleic acid (BNA)
  modified_base 9: mod_base = OTHER; note = bicyclic nucleic acid (BNA)
  modified_base 9: mod_base = OTHER; note = 5-methyl
  modified_base 13..14: mod_base = OTHER; note = 5-methyl
  modified_base 18: mod_base = OTHER; note = 5-methyl
  source 1..18: mol_type = other DNA
ggtaagttctgtccaagc

SEQ ID NO: 12104 - DNA, 18 bp, synthetic construct
  misc_feature 1..18: note = Description of Artificial Sequence: Synthetic Antisense oligonucleotide
  modified_base 1: mod_base = OTHER; note = bicyclic nucleic acid (BNA)
  modified_base 12: mod_base = OTHER; note = bicyclic nucleic acid (BNA)
  modified_base 17: mod_base = OTHER; note = bicyclic nucleic acid (BNA)
  modified_base 8: mod_base = OTHER; note = 5-methyl
  modified_base 12..13: mod_base = OTHER; note = 5-methyl
  modified_base 17..18: mod_base = OTHER; note = 5-methyl
  source 1..18: mol_type = other DNA
gtaagttctgtccaagcc

SEQ ID NO: 12105 - DNA, 18 bp, synthetic construct
  misc_feature 1..18: note = Description of Artificial Sequence: Synthetic Antisense oligonucleotide
  modified_base 1: mod_base = OTHER; note = bicyclic nucleic acid (BNA)
  modified_base 5: mod_base = OTHER; note = bicyclic nucleic acid (BNA)
  modified_base 8: mod_base = OTHER; note = bicyclic nucleic acid (BNA)
  modified_base 8: mod_base = OTHER; note = 5-methyl
  modified_base 12..13: mod_base = OTHER; note = 5-methyl
  modified_base 17..18: mod_base = OTHER; note = 5-methyl
  source 1..18: mol_type = other DNA
gtaagttctgtccaagcc

SEQ ID NO: 12106 - DNA, 18 bp, synthetic construct
  misc_feature 1..18: note = Description of Artificial Sequence: Synthetic Antisense oligonucleotide
  modified_base 1: mod_base = OTHER; note = bicyclic nucleic acid (BNA)
  modified_base 8: mod_base = OTHER; note = bicyclic nucleic acid (BNA)
  modified_base 13: mod_base = OTHER; note = bicyclic nucleic acid (BNA)
  modified_base 8: mod_base = OTHER; note = 5-methyl
  modified_base 12..13: mod_base = OTHER; note = 5-methyl
  modified_base 17..18: mod_base = OTHER; note = 5-methyl
  source 1..18: mol_type = other DNA
gtaagttctgtccaagcc

SEQ ID NO: 12107 - DNA, 18 bp, synthetic construct
  misc_feature 1..18: note = Description of Artificial Sequence: Synthetic Antisense oligonucleotide
  modified_base 1: mod_base = OTHER; note = bicyclic nucleic acid (BNA)
  modified_base 5: mod_base = OTHER; note = bicyclic nucleic acid (BNA)
  modified_base 13: mod_base = OTHER; note = bicyclic nucleic acid (BNA)
  modified_base 8: mod_base = OTHER; note = 5-methyl
  modified_base 12..13: mod_base = OTHER; note = 5-methyl
  modified_base 17..18: mod_base = OTHER; note = 5-methyl
  source 1..18: mol_type = other DNA
gtaagttctgtccaagcc

SEQ ID NO: 12108 - DNA, 18 bp, synthetic construct
  misc_feature 1..18: note = Description of Artificial Sequence: Synthetic Antisense oligonucleotide
  modified_base 1: mod_base = OTHER; note = bicyclic nucleic acid (BNA)
  modified_base 8: mod_base = OTHER; note = bicyclic nucleic acid (BNA)
  modified_base 17: mod_base = OTHER; note = bicyclic nucleic acid (BNA)
  modified_base 8: mod_base = OTHER; note = 5-methyl
  modified_base 12..13: mod_base = OTHER; note = 5-methyl
  modified_base 17..18: mod_base = OTHER; note = 5-methyl
  source 1..18: mol_type = other DNA
gtaagttctgtccaagcc

SEQ ID NO: 12109 - DNA, 18 bp, synthetic construct
  misc_feature 1..18: note = Description of Artificial Sequence: Synthetic Antisense oligonucleotide
  modified_base 1: mod_base = OTHER; note = bicyclic nucleic acid (BNA)
  modified_base 13: mod_base = OTHER; note = bicyclic nucleic acid (BNA)
  modified_base 17: mod_base = OTHER; note = bicyclic nucleic acid (BNA)
  modified_base 8: mod_base = OTHER; note = 5-methyl
  modified_base 12..13: mod_base = OTHER; note = 5-methyl
  modified_base 17..18: mod_base = OTHER; note = 5-methyl
  source 1..18: mol_type = other DNA
gtaagttctgtccaagcc

SEQ ID NO: 12110 - DNA, 18 bp, synthetic construct
  misc_feature 1..18: note = Description of Artificial Sequence: Synthetic Antisense oligonucleotide
  modified_base 1: mod_base = OTHER; note = bicyclic nucleic acid (BNA)
  modified_base 8: mod_base = OTHER; note = bicyclic nucleic acid (BNA)
  modified_base 12: mod_base = OTHER; note = bicyclic nucleic acid (BNA)
  modified_base 8: mod_base = OTHER; note = 5-methyl
  modified_base 12..13: mod_base = OTHER; note = 5-methyl
  modified_base 17..18: mod_base = OTHER; note = 5-methyl
  source 1..18: mol_type = other DNA
gtaagttctgtccaagcc

SEQ ID NO: 12111 - DNA, 18 bp, synthetic construct
  misc_feature 1..18: note = Description of Artificial Sequence: Synthetic Antisense oligonucleotide
  modified_base 1: mod_base = OTHER; note = bicyclic nucleic acid (BNA)
  modified_base 5: mod_base = OTHER; note = bicyclic nucleic acid (BNA)
  modified_base 10: mod_base = OTHER; note = bicyclic nucleic acid (BNA)
  modified_base 8: mod_base = OTHER; note = 5-methyl
  modified_base 12..13: mod_base = OTHER; note = 5-methyl
  modified_base 17..18: mod_base = OTHER; note = 5-methyl
  source 1..18: mol_type = other DNA
gtaagttctgtccaagcc

SEQ ID NO: 12112 - DNA, 18 bp, synthetic construct
  misc_feature 1..18: note = Description of Artificial Sequence: Synthetic Antisense oligonucleotide
  modified_base 1: mod_base = OTHER; note = bicyclic nucleic acid (BNA)
  modified_base 8: mod_base = OTHER; note = bicyclic nucleic acid (BNA)
  modified_base 16: mod_base = OTHER; note = bicyclic nucleic acid (BNA)
  modified_base 8: mod_base = OTHER; note = 5-methyl
  modified_base 12..13: mod_base = OTHER; note = 5-methyl
  modified_base 17..18: mod_base = OTHER; note = 5-methyl
  source 1..18: mol_type = other DNA
gtaagttctgtccaagcc

SEQ ID NO: 12113 - DNA, 18 bp, synthetic construct
  misc_feature 1..18: note = Description of Artificial Sequence: Synthetic Antisense oligonucleotide
  modified_base 1: mod_base = OTHER; note = bicyclic nucleic acid (BNA)
  modified_base 10: mod_base = OTHER; note = bicyclic nucleic acid (BNA)
  modified_base 16: mod_base = OTHER; note = bicyclic nucleic acid (BNA)
  modified_base 8: mod_base = OTHER; note = 5-methyl
  modified_base 12..13: mod_base = OTHER; note = 5-methyl
  modified_base 17..18: mod_base = OTHER; note = 5-methyl
  source 1..18: mol_type = other DNA
gtaagttctgtccaagcc

SEQ ID NO: 12114 - DNA, 18 bp, synthetic construct
  misc_feature 1..18: note = Description of Artificial Sequence: Synthetic Antisense oligonucleotide
  modified_base 1: mod_base = OTHER; note = bicyclic nucleic acid (BNA)
  modified_base 10: mod_base = OTHER; note = bicyclic nucleic acid (BNA)
  modified_base 12: mod_base = OTHER; note = bicyclic nucleic acid (BNA)
  modified_base 8: mod_base = OTHER; note = 5-methyl
  modified_base 12..13: mod_base = OTHER; note = 5-methyl
  modified_base 17..18: mod_base = OTHER; note = 5-methyl
  source 1..18: mol_type = other DNA
gtaagttctgtccaagcc

SEQ ID NO: 12115 - DNA, 18 bp, synthetic construct
  misc_feature 1..18: note = Description of Artificial Sequence: Synthetic Antisense oligonucleotide
  modified_base 1: mod_base = OTHER; note = bicyclic nucleic acid (BNA)
  modified_base 5: mod_base = OTHER; note = bicyclic nucleic acid (BNA)
  modified_base 17: mod_base = OTHER; note = bicyclic nucleic acid (BNA)
  modified_base 8: mod_base = OTHER; note = 5-methyl
  modified_base 12..13: mod_base = OTHER; note = 5-methyl
  modified_base 17..18: mod_base = OTHER; note = 5-methyl
  source 1..18: mol_type = other DNA
gtaagttctgtccaagcc

SEQ ID NO: 12116 - DNA, 18 bp, synthetic construct
  misc_feature 1..18: note = Description of Artificial Sequence: Synthetic Antisense oligonucleotide
  modified_base 1: mod_base = OTHER; note = bicyclic nucleic acid (BNA)
  modified_base 10: mod_base = OTHER; note = bicyclic nucleic acid (BNA)
  modified_base 17: mod_base = OTHER; note = bicyclic nucleic acid (BNA)
  modified_base 8: mod_base = OTHER; note = 5-methyl
  modified_base 12..13: mod_base = OTHER; note = 5-methyl
  modified_base 17..18: mod_base = OTHER; note = 5-methyl
  source 1..18: mol_type = other DNA
gtaagttctgtccaagcc

SEQ ID NO: 12117 - DNA, 18 bp, synthetic construct
  misc_feature 1..18: note = Description of Artificial Sequence: Synthetic Antisense oligonucleotide
  modified_base 1: mod_base = OTHER; note = bicyclic nucleic acid (BNA)
  modified_base 12..13: mod_base = OTHER; note = bicyclic nucleic acid (BNA)
  modified_base 8: mod_base = OTHER; note = 5-methyl
  modified_base 12..13: mod_base = OTHER; note = 5-methyl
  modified_base 17..18: mod_base = OTHER; note = 5-methyl
  source 1..18: mol_type = other DNA
gtaagttctgtccaagcc

SEQ ID NO: 12118 - DNA, 18 bp, synthetic construct
  misc_feature 1..18: note = Description of Artificial Sequence: Synthetic Antisense oligonucleotide
  modified_base 1: mod_base = OTHER; note = bicyclic nucleic acid (BNA)
  modified_base 5: mod_base = OTHER; note = bicyclic nucleic acid (BNA)
  modified_base 12: mod_base = OTHER; note = bicyclic nucleic acid (BNA)
  modified_base 8: mod_base = OTHER; note = 5-methyl
  modified_base 12..13: mod_base = OTHER; note = 5-methyl
  modified_base 17..18: mod_base = OTHER; note = 5-methyl
  source 1..18: mol_type = other DNA
gtaagttctgtccaagcc

SEQ ID NO: 12119 - DNA, 18 bp, synthetic construct
  misc_feature 1..18: note = Description of Artificial Sequence: Synthetic Antisense oligonucleotide
  modified_base 1: mod_base = OTHER; note = bicyclic nucleic acid (BNA)
  modified_base 8: mod_base = OTHER; note = bicyclic nucleic acid (BNA)
  modified_base 10: mod_base = OTHER; note = bicyclic nucleic acid (BNA)
  modified_base 8: mod_base = OTHER; note = 5-methyl
  modified_base 12..13: mod_base = OTHER; note = 5-methyl
  modified_base 17..18: mod_base = OTHER; note = 5-methyl
  source 1..18: mol_type = other DNA
gtaagttctgtccaagcc

SEQ ID NO: 12120 - DNA, 18 bp, synthetic construct
  misc_feature 1..18: note = Description of Artificial Sequence: Synthetic Antisense oligonucleotide
  modified_base 1: mod_base = OTHER; note = bicyclic nucleic acid (BNA)
  modified_base 13: mod_base = OTHER; note = bicyclic nucleic acid (BNA)
  modified_base 16: mod_base = OTHER; note = bicyclic nucleic acid (BNA)
  modified_base 8: mod_base = OTHER; note = 5-methyl
  modified_base 12..13: mod_base = OTHER; note = 5-methyl
  modified_base 17..18: mod_base = OTHER; note = 5-methyl
  source 1..18: mol_type = other DNA
gtaagttctgtccaagcc

SEQ ID NO: 12121 - DNA, 18 bp, synthetic construct
  misc_feature 1..18: note = Description of Artificial Sequence: Synthetic Antisense oligonucleotide
  modified_base 1: mod_base = OTHER; note = bicyclic nucleic acid (BNA)
  modified_base 5: mod_base = OTHER; note = bicyclic nucleic acid (BNA)
  modified_base 16: mod_base = OTHER; note = bicyclic nucleic acid (BNA)
  modified_base 8: mod_base = OTHER; note = 5-methyl
  modified_base 12..13: mod_base = OTHER; note = 5-methyl
  modified_base 17..18: mod_base = OTHER; note = 5-methyl
  source 1..18: mol_type = other DNA
gtaagttctgtccaagcc

SEQ ID NO: 12122 - DNA, 18 bp, synthetic construct
  misc_feature 1..18: note = Description of Artificial Sequence: Synthetic Antisense oligonucleotide
  modified_base 1: mod_base = OTHER; note = bicyclic nucleic acid (BNA)
  modified_base 12: mod_base = OTHER; note = bicyclic nucleic acid (BNA)
  modified_base 16: mod_base = OTHER; note = bicyclic nucleic acid (BNA)
  modified_base 8: mod_base = OTHER; note = 5-methyl
  modified_base 12..13: mod_base = OTHER; note = 5-methyl
  modified_base 17..18: mod_base = OTHER; note = 5-methyl
  source 1..18: mol_type = other DNA
gtaagttctgtccaagcc

SEQ ID NO: 12123 - DNA, 18 bp, synthetic construct
  misc_feature 1..18: note = Description of Artificial Sequence: Synthetic Antisense oligonucleotide
  modified_base 1: mod_base = OTHER; note = bicyclic nucleic acid (BNA)
  modified_base 16..17: mod_base = OTHER; note = bicyclic nucleic acid (BNA)
  modified_base 8: mod_base = OTHER; note = 5-methyl
  modified_base 12..13: mod_base = OTHER; note = 5-methyl
  modified_base 17..18: mod_base = OTHER; note = 5-methyl
  source 1..18: mol_type = other DNA
gtaagttctgtccaagcc

SEQ ID NO: 12124 - DNA, 18 bp, synthetic construct
  misc_feature 1..18: note = Description of Artificial Sequence: Synthetic Antisense oligonucleotide
  modified_base 1: mod_base = OTHER; note = bicyclic nucleic acid (BNA)
  modified_base 10: mod_base = OTHER; note = bicyclic nucleic acid (BNA)
  modified_base 13: mod_base = OTHER; note = bicyclic nucleic acid (BNA)
  modified_base 8: mod_base = OTHER; note = 5-methyl
  modified_base 12..13: mod_base = OTHER; note = 5-methyl
  modified_base 17..18: mod_base = OTHER; note = 5-methyl
  source 1..18: mol_type = other DNA
gtaagttctgtccaagcc

SEQ ID NO: 12125 - DNA, 18 bp, synthetic construct
  misc_feature 1..18: note = Description of Artificial Sequence: Synthetic Antisense oligonucleotide
  modified_base 1: mod_base = OTHER; note = bicyclic nucleic acid (BNA)
  modified_base 6: mod_base = OTHER; note = bicyclic nucleic acid (BNA)
  modified_base 10: mod_base = OTHER; note = bicyclic nucleic acid (BNA)
  modified_base 4: mod_base = OTHER; note = 5-methyl
  modified_base 13: mod_base = OTHER; note = 5-methyl
  modified_base 17..18: mod_base = OTHER; note = 5-methyl
  source 1..18: mol_type = other DNA
agtcggtaagttctgtcc

SEQ ID NO: 12126 - DNA, 18 bp, synthetic construct
  misc_feature 1..18: note = Description of Artificial Sequence: Synthetic Antisense oligonucleotide
  modified_base 1: mod_base = OTHER; note = bicyclic nucleic acid (BNA)
  modified_base 5: mod_base = OTHER; note = bicyclic nucleic acid (BNA)
  modified_base 13: mod_base = OTHER; note = bicyclic nucleic acid (BNA)
  modified_base 4: mod_base = OTHER; note = 5-methyl
  modified_base 13: mod_base = OTHER; note = 5-methyl
  modified_base 17..18: mod_base = OTHER; note = 5-methyl
  source 1..18: mol_type = other DNA
agtcggtaagttctgtcc

SEQ ID NO: 12127 - DNA, 18 bp, synthetic construct
  misc_feature 1..18: note = Description of Artificial Sequence: Synthetic Antisense oligonucleotide
  modified_base 1: mod_base = OTHER; note = bicyclic nucleic acid (BNA)
  modified_base 13: mod_base = OTHER; note = bicyclic nucleic acid (BNA)
  modified_base 17: mod_base = OTHER; note = bicyclic nucleic acid (BNA)
  modified_base 4: mod_base = OTHER; note = 5-methyl
  modified_base 13: mod_base = OTHER; note = 5-methyl
  modified_base 17..18: mod_base = OTHER; note = 5-methyl
  source 1..18: mol_type = other DNA
agtcggtaagttctgtcc

SEQ ID NO: 12128 - DNA, 18 bp, synthetic construct
  misc_feature 1..18: note = Description of Artificial Sequence: Synthetic Antisense oligonucleotide
  modified_base 1: mod_base = OTHER; note = bicyclic nucleic acid (BNA)
  modified_base 4: mod_base = OTHER; note = bicyclic nucleic acid (BNA)
  modified_base 15: mod_base = OTHER; note = bicyclic nucleic acid (BNA)
  modified_base 4: mod_base = OTHER; note = 5-methyl
  modified_base 13: mod_base = OTHER; note = 5-methyl
  modified_base 17..18: mod_base = OTHER; note = 5-methyl
  source 1..18: mol_type = other DNA
agtcggtaagttctgtcc

SEQ ID NO: 12129 - DNA, 18 bp, synthetic construct
  misc_feature 1..18: note = Description of Artificial Sequence: Synthetic Antisense oligonucleotide
  modified_base 1: mod_base = OTHER; note = bicyclic nucleic acid (BNA)
  modified_base 5: mod_base = OTHER; note = bicyclic nucleic acid (BNA)
  modified_base 10: mod_base = OTHER; note = bicyclic nucleic acid (BNA)
  modified_base 4: mod_base = OTHER; note = 5-methyl
  modified_base 13: mod_base = OTHER; note = 5-methyl
  modified_base 17..18: mod_base = OTHER; note = 5-methyl
  source 1..18: mol_type = other DNA
agtcggtaagttctgtcc

SEQ ID NO: 12130 - DNA, 18 bp, synthetic construct
  misc_feature 1..18: note = Description of Artificial Sequence: Synthetic Antisense oligonucleotide
  modified_base 1: mod_base = OTHER; note = bicyclic nucleic acid (BNA)
  modified_base 6: mod_base = OTHER; note = bicyclic nucleic acid (BNA)
  modified_base 13: mod_base = OTHER; note = bicyclic nucleic acid (BNA)
  modified_base 4: mod_base = OTHER; note = 5-methyl
  modified_base 13: mod_base = OTHER; note = 5-methyl
  modified_base 17..18: mod_base = OTHER; note = 5-methyl
  source 1..18: mol_type = other DNA
agtcggtaagttctgtcc

SEQ ID NO: 12131 - DNA, 18 bp, synthetic construct
  misc_feature 1..18: note = Description of Artificial Sequence: Synthetic Antisense oligonucleotide
  modified_base 1: mod_base = OTHER; note = bicyclic nucleic acid (BNA)
  modified_base 4: mod_base = OTHER; note = bicyclic nucleic acid (BNA)
  modified_base 17: mod_base = OTHER; note = bicyclic nucleic acid (BNA)
  modified_base 4: mod_base = OTHER; note = 5-methyl
  modified_base 13: mod_base = OTHER; note = 5-methyl
  modified_base 17..18: mod_base = OTHER; note = 5-methyl
  source 1..18: mol_type = other DNA
agtcggtaagttctgtcc

SEQ ID NO: 12132 - DNA, 18 bp, synthetic construct
  misc_feature 1..18: note = Description of Artificial Sequence: Synthetic Antisense oligonucleotide
  modified_base 1: mod_base = OTHER; note = bicyclic nucleic acid (BNA)
  modified_base 10: mod_base = OTHER; note = bicyclic nucleic acid (BNA)
  modified_base 15: mod_base = OTHER; note = bicyclic nucleic acid (BNA)
  modified_base 4: mod_base = OTHER; note = 5-methyl
  modified_base 13: mod_base = OTHER; note = 5-methyl
  modified_base 17..18: mod_base = OTHER; note = 5-methyl
  source 1..18: mol_type = other DNA
agtcggtaagttctgtcc

SEQ ID NO: 12133 - DNA, 18 bp, synthetic construct
  misc_feature 1..18: note = Description of Artificial Sequence: Synthetic Antisense oligonucleotide
  modified_base 1: mod_base = OTHER; note = bicyclic nucleic acid (BNA)
  modified_base 13: mod_base = OTHER; note = bicyclic nucleic acid (BNA)
  modified_base 15: mod_base = OTHER; note = bicyclic nucleic acid (BNA)
  modified_base 4: mod_base = OTHER; note = 5-methyl
  modified_base 13: mod_base = OTHER; note = 5-methyl
  modified_base 17..18: mod_base = OTHER; note = 5-methyl
  source 1..18: mol_type = other DNA
agtcggtaagttctgtcc

SEQ ID NO: 12134 - DNA, 18 bp, synthetic construct
  misc_feature 1..18: note = Description of Artificial Sequence: Synthetic Antisense oligonucleotide
  modified_base 1: mod_base = OTHER; note = bicyclic nucleic acid (BNA)
  modified_base 5..6: mod_base = OTHER; note = bicyclic nucleic acid (BNA)
  modified_base 4: mod_base = OTHER; note = 5-methyl
  modified_base 13: mod_base = OTHER; note = 5-methyl
  modified_base 17..18: mod_base = OTHER; note = 5-methyl
  source 1..18: mol_type = other DNA
agtcggtaagttctgtcc

SEQ ID NO: 12135 - DNA, 18 bp, synthetic construct
  misc_feature 1..18: note = Description of Artificial Sequence: Synthetic Antisense oligonucleotide
  modified_base 1: mod_base = OTHER; note = bicyclic nucleic acid (BNA)
  modified_base 5: mod_base = OTHER; note = bicyclic nucleic acid (BNA)
  modified_base 15: mod_base = OTHER; note = bicyclic nucleic acid (BNA)
  modified_base 4: mod_base = OTHER; note = 5-methyl
  modified_base 13: mod_base = OTHER; note = 5-methyl
  modified_base 17..18: mod_base = OTHER; note = 5-methyl
  source 1..18: mol_type = other DNA
agtcggtaagttctgtcc

SEQ ID NO: 12136 - DNA, 18 bp, synthetic construct
  misc_feature 1..18: note = Description of Artificial Sequence: Synthetic Antisense oligonucleotide
  modified_base 1: mod_base = OTHER; note = bicyclic nucleic acid (BNA)
  modified_base 5: mod_base = OTHER; note = bicyclic nucleic acid (BNA)
  modified_base 17: mod_base = OTHER; note = bicyclic nucleic acid (BNA)
  modified_base 4: mod_base = OTHER; note = 5-methyl
  modified_base 13: mod_base = OTHER; note = 5-methyl
  modified_base 17..18: mod_base = OTHER; note = 5-methyl
  source 1..18: mol_type = other DNA
agtcggtaagttctgtcc

SEQ ID NO: 12137 - DNA, 18 bp, synthetic construct
  misc_feature 1..18: note = Description of Artificial Sequence: Synthetic Antisense oligonucleotide
  modified_base 1: mod_base = OTHER; note = bicyclic nucleic acid (BNA)
  modified_base 10: mod_base = OTHER; note = bicyclic nucleic acid (BNA)
  modified_base 17: mod_base = OTHER; note = bicyclic nucleic acid (BNA)
  modified_base 4: mod_base = OTHER; note = 5-methyl
  modified_base 13: mod_base = OTHER; note = 5-methyl
  modified_base 17..18: mod_base = OTHER; note = 5-methyl
  source 1..18: mol_type = other DNA
agtcggtaagttctgtcc

SEQ ID NO: 12138 - DNA, 18 bp, synthetic construct
  misc_feature 1..18: note = Description of Artificial Sequence: Synthetic Antisense oligonucleotide
  modified_base 1: mod_base = OTHER; note = bicyclic nucleic acid (BNA)
  modified_base 4: mod_base = OTHER; note = bicyclic nucleic acid (BNA)
  modified_base 10: mod_base = OTHER; note = bicyclic nucleic acid (BNA)
  modified_base 4: mod_base = OTHER; note = 5-methyl
  modified_base 13: mod_base = OTHER; note = 5-methyl
  modified_base 17..18: mod_base = OTHER; note = 5-methyl
  source 1..18: mol_type = other DNA
agtcggtaagttctgtcc

SEQ ID NO: 12139 - DNA, 18 bp, synthetic construct
  misc_feature 1..18: note = Description of Artificial Sequence: Synthetic Antisense oligonucleotide
  modified_base 1: mod_base = OTHER; note = bicyclic nucleic acid (BNA)
  modified_base 4: mod_base = OTHER; note = bicyclic nucleic acid (BNA)
  modified_base 6: mod_base = OTHER; note = bicyclic nucleic acid (BNA)
  modified_base 4: mod_base = OTHER; note = 5-methyl
  modified_base 13: mod_base = OTHER; note = 5-methyl
  modified_base 17..18: mod_base = OTHER; note = 5-methyl
  source 1..18: mol_type = other DNA
agtcggtaagttctgtcc

SEQ ID NO: 12140 - DNA, 18 bp, synthetic construct
  misc_feature 1..18: note = Description of Artificial Sequence: Synthetic Antisense oligonucleotide
  modified_base 1: mod_base = OTHER; note = bicyclic nucleic acid (BNA)
  modified_base 4: mod_base = OTHER; note = bicyclic nucleic acid (BNA)
  modified_base 13: mod_base = OTHER; note = bicyclic nucleic acid (BNA)
  modified_base 4: mod_base = OTHER; note = 5-methyl
  modified_base 13: mod_base = OTHER; note = 5-methyl
  modified_base 17..18: mod_base = OTHER; note = 5-methyl
  source 1..18: mol_type = other DNA
agtcggtaagttctgtcc

SEQ ID NO: 12141 - DNA, 18 bp, synthetic construct
  misc_feature 1..18: note = Description of Artificial Sequence: Synthetic Antisense oligonucleotide
  modified_base 1: mod_base = OTHER; note = bicyclic nucleic acid (BNA)
  modified_base 15: mod_base = OTHER; note = bicyclic nucleic acid (BNA)
  modified_base 17: mod_base = OTHER; note = bicyclic nucleic acid (BNA)
  modified_base 4: mod_base = OTHER; note = 5-methyl
  modified_base 13: mod_base = OTHER; note = 5-methyl
  modified_base 17..18: mod_base = OTHER; note = 5-methyl
  source 1..18: mol_type = other DNA
agtcggtaagttctgtcc

SEQ ID NO: 12142 - DNA, 18 bp, synthetic construct
  misc_feature 1..18: note = Description of Artificial Sequence: Synthetic Antisense oligonucleotide
  modified_base 1: mod_base = OTHER; note = bicyclic nucleic acid (BNA)
  modified_base 6: mod_base = OTHER; note = bicyclic nucleic acid (BNA)
  modified_base 17: mod_base = OTHER; note = bicyclic nucleic acid (BNA)
  modified_base 4: mod_base = OTHER; note = 5-methyl
  modified_base 13: mod_base = OTHER; note = 5-methyl
  modified_base 17..18: mod_base = OTHER; note = 5-methyl
  source 1..18: mol_type = other DNA
agtcggtaagttctgtcc

SEQ ID NO: 12143 - DNA, 18 bp, synthetic construct
  misc_feature 1..18: note = Description of Artificial Sequence: Synthetic Antisense oligonucleotide
  modified_base 1: mod_base = OTHER; note = bicyclic nucleic acid (BNA)
  modified_base 6: mod_base = OTHER; note = bicyclic nucleic acid (BNA)
  modified_base 15: mod_base = OTHER; note = bicyclic nucleic acid (BNA)
  modified_base 4: mod_base = OTHER; note = 5-methyl
  modified_base 13: mod_base = OTHER; note = 5-methyl
  modified_base 17..18: mod_base = OTHER; note = 5-methyl
  source 1..18: mol_type = other DNA
agtcggtaagttctgtcc

SEQ ID NO: 12144 - DNA, 18 bp, synthetic construct
  misc_feature 1..18: note = Description of Artificial Sequence: Synthetic Antisense oligonucleotide
  modified_base 1: mod_base = OTHER; note = bicyclic nucleic acid (BNA)
  modified_base 4..5: mod_base = OTHER; note = bicyclic nucleic acid (BNA)
  modified_base 4: mod_base = OTHER; note = 5-methyl
  modified_base 13: mod_base = OTHER; note = 5-methyl
  modified_base 17..18: mod_base = OTHER; note = 5-methyl
  source 1..18: mol_type = other DNA
agtcggtaagttctgtcc

SEQ ID NO: 12145 - DNA, 18 bp, synthetic construct
  misc_feature 1..18: note = Description of Artificial Sequence: Synthetic Antisense oligonucleotide
  modified_base 1: mod_base = OTHER; note = bicyclic nucleic acid (BNA)
  modified_base 10: mod_base = OTHER; note = bicyclic nucleic acid (BNA)
  modified_base 13: mod_base = OTHER; note = bicyclic nucleic acid (BNA)
  modified_base 4: mod_base = OTHER; note = 5-methyl
  modified_base 13: mod_base = OTHER; note = 5-methyl
  modified_base 17..18: mod_base = OTHER; note = 5-methyl
  source 1..18: mol_type = other DNA
agtcggtaagttctgtcc

SEQ ID NO: 12146 - DNA, 18 bp, synthetic construct
  misc_feature 1..18: note = Description of Artificial Sequence: Synthetic Antisense oligonucleotide
  modified_base 1: mod_base = OTHER; note = 5-methyl
  modified_base 5..6: mod_base = OTHER; note = 5-methyl
  modified_base 10..12: mod_base = OTHER; note = 5-methyl
  modified_base 1: mod_base = OTHER; note = bicyclic nucleic acid (BNA)
  modified_base 12: mod_base = OTHER; note = bicyclic nucleic acid (BNA)
  modified_base 17: mod_base = OTHER; note = bicyclic nucleic acid (BNA)
  source 1..18: mol_type = other DNA
ctgtccaagcccggttga

SEQ ID NO: 12147 - DNA, 18 bp, synthetic construct
  misc_feature 1..18: note = Description of Artificial Sequence: Synthetic Antisense oligonucleotide
  modified_base 1: mod_base = OTHER; note = 5-methyl
  modified_base 5..6: mod_base = OTHER; note = 5-methyl
  modified_base 10..12: mod_base = OTHER; note = 5-methyl
  modified_base 1: mod_base = OTHER; note = bicyclic nucleic acid (BNA)
  modified_base 6: mod_base = OTHER; note = bicyclic nucleic acid (BNA)
  modified_base 10: mod_base = OTHER; note = bicyclic nucleic acid (BNA)
  source 1..18: mol_type = other DNA
ctgtccaagcccggttga

SEQ ID NO: 12148 - DNA, 18 bp, synthetic construct
  misc_feature 1..18: note = Description of Artificial Sequence: Synthetic Antisense oligonucleotide
  modified_base 1: mod_base = OTHER; note = 5-methyl
  modified_base 5..6: mod_base = OTHER; note = 5-methyl
  modified_base 10..12: mod_base = OTHER; note = 5-methyl
  modified_base 1: mod_base = OTHER; note = bicyclic nucleic acid (BNA)
  modified_base 9: mod_base = OTHER; note = bicyclic nucleic acid (BNA)
  modified_base 14: mod_base = OTHER; note = bicyclic nucleic acid (BNA)
  source 1..18: mol_type = other DNA
ctgtccaagcccggttga

SEQ ID NO: 12149 - DNA, 18 bp, synthetic construct
  misc_feature 1..18: note = Description of Artificial Sequence: Synthetic Antisense oligonucleotide
  modified_base 1: mod_base = OTHER; note = 5-methyl
  modified_base 5..6: mod_base = OTHER; note = 5-methyl
  modified_base 10..12: mod_base = OTHER; note = 5-methyl
  modified_base 1: mod_base = OTHER; note = bicyclic nucleic acid (BNA)
  modified_base 11..12: mod_base = OTHER; note = bicyclic nucleic acid (BNA)
  source 1..18: mol_type = other DNA
ctgtccaagcccggttga

SEQ ID NO: 12150 - DNA, 18 bp, synthetic construct
  misc_feature 1..18: note = Description of Artificial Sequence: Synthetic Antisense oligonucleotide
  modified_base 1: mod_base = OTHER; note = 5-methyl
  modified_base 5..6: mod_base = OTHER; note = 5-methyl
  modified_base 10..12: mod_base = OTHER; note = 5-methyl
  modified_base 1: mod_base = OTHER; note = bicyclic nucleic acid (BNA)
  modified_base 5: mod_base = OTHER; note = bicyclic nucleic acid (BNA)
  modified_base 9: mod_base = OTHER; note = bicyclic nucleic acid (BNA)
  source 1..18: mol_type = other DNA
ctgtccaagcccggttga

SEQ ID NO: 12151 - DNA, 18 bp, synthetic construct
  misc_feature 1..18: note = Description of Artificial Sequence: Synthetic Antisense oligonucleotide
  modified_base 1: mod_base = OTHER; note = 5-methyl
  modified_base 5..6: mod_base = OTHER; note = 5-methyl
  modified_base 10..12: mod_base = OTHER; note = 5-methyl
  modified_base 1: mod_base = OTHER; note = bicyclic nucleic acid (BNA)
  modified_base 3: mod_base = OTHER; note = bicyclic nucleic acid (BNA)
  modified_base 9: mod_base = OTHER; note = bicyclic nucleic acid (BNA)
  source 1..18: mol_type = other DNA
ctgtccaagcccggttga

SEQ ID NO: 12152 - DNA, 18 bp, synthetic construct
  misc_feature 1..18: note = Description of Artificial Sequence: Synthetic Antisense oligonucleotide
  modified_base 1: mod_base = OTHER; note = 5-methyl
  modified_base 5..6: mod_base = OTHER; note = 5-methyl
  modified_base 10..12: mod_base = OTHER; note = 5-methyl
  modified_base 1: mod_base = OTHER; note = bicyclic nucleic acid (BNA)
  modified_base 6: mod_base = OTHER; note = bicyclic nucleic acid (BNA)
  modified_base 14: mod_base = OTHER; note = bicyclic nucleic acid (BNA)
  source 1..18: mol_type = other DNA
ctgtccaagcccggttga

SEQ ID NO: 12153 - DNA, 18 bp, synthetic construct
  misc_feature 1..18: note = Description of Artificial Sequence: Synthetic Antisense oligonucleotide
  modified_base 1: mod_base = OTHER; note = 5-methyl
  modified_base 5..6: mod_base = OTHER; note = 5-methyl
  modified_base 10..12: mod_base = OTHER; note = 5-methyl
  modified_base 1: mod_base = OTHER; note = bicyclic nucleic acid (BNA)
  modified_base 9..10: mod_base = OTHER; note = bicyclic nucleic acid (BNA)
  source 1..18: mol_type = other DNA
ctgtccaagcccggttga

SEQ ID NO: 12154 - DNA, 18 bp, synthetic construct
  misc_feature 1..18: note = Description of Artificial Sequence: Synthetic Antisense oligonucleotide
  modified_base 1: mod_base = OTHER; note = 5-methyl
  modified_base 5..6: mod_base = OTHER; note = 5-methyl
  modified_base 10..12: mod_base = OTHER; note = 5-methyl
  modified_base 1: mod_base = OTHER; note = bicyclic nucleic acid (BNA)
  modified_base 5: mod_base = OTHER; note = bicyclic nucleic acid (BNA)
  modified_base 13: mod_base = OTHER; note = bicyclic nucleic acid (BNA)
  source 1..18: mol_type = other DNA
ctgtccaagcccggttga

SEQ ID NO: 12155 - DNA, 18 bp, synthetic construct
  misc_feature 1..18: note = Description of Artificial Sequence: Synthetic Antisense oligonucleotide
  modified_base 1: mod_base = OTHER; note = 5-methyl
  modified_base 5..6: mod_base = OTHER; note = 5-methyl
  modified_base 10..12: mod_base = OTHER; note = 5-methyl
  modified_base 1: mod_base = OTHER; note = bicyclic nucleic acid (BNA)
  modified_base 3: mod_base = OTHER; note = bicyclic nucleic acid (BNA)
  modified_base 13: mod_base = OTHER; note = bicyclic nucleic acid (BNA)
  source 1..18: mol_type = other DNA
ctgtccaagcccggttga

SEQ ID NO: 12156 - DNA, 18 bp, synthetic construct
  misc_feature 1..18: note = Description of Artificial Sequence: Synthetic Antisense oligonucleotide
  modified_base 1: mod_base = OTHER; note = 5-methyl
  modified_base 5..6: mod_base = OTHER; note = 5-methyl
  modified_base 10..12: mod_base = OTHER; note = 5-methyl
  modified_base 1: mod_base = OTHER; note = bicyclic nucleic acid (BNA)
  modified_base 13: mod_base = OTHER; note = bicyclic nucleic acid (BNA)
  modified_base 17: mod_base = OTHER; note = bicyclic nucleic acid (BNA)
  source 1..18: mol_type = other DNA
ctgtccaagcccggttga

SEQ ID NO: 12157 - DNA, 18 bp, synthetic construct
  misc_feature 1..18: note = Description of Artificial Sequence: Synthetic Antisense oligonucleotide
  modified_base 1: mod_base = OTHER; note = 5-methyl
  modified_base 5..6: mod_base = OTHER; note = 5-methyl
  modified_base 10..12: mod_base = OTHER; note = 5-methyl
  modified_base 1: mod_base = OTHER; note = bicyclic nucleic acid (BNA)
  modified_base 3: mod_base = OTHER; note = bicyclic nucleic acid (BNA)
  modified_base 6: mod_base = OTHER; note = bicyclic nucleic acid (BNA)
  source 1..18: mol_type = other DNA
ctgtccaagcccggttga

SEQ ID NO: 12158 - DNA, 18 bp, synthetic construct
  misc_feature 1..18: note = Description of Artificial Sequence: Synthetic Antisense oligonucleotide
  modified_base 1: mod_base = OTHER; note = 5-methyl
  modified_base 5..6: mod_base = OTHER; note = 5-methyl
  modified_base 10..12: mod_base = OTHER; note = 5-methyl
  modified_base 1: mod_base = OTHER; note = bicyclic nucleic acid (BNA)
  modified_base 6: mod_base = OTHER; note = bicyclic nucleic acid (BNA)
  modified_base 9: mod_base = OTHER; note = bicyclic nucleic acid (BNA)
  source 1..18: mol_type = other DNA
ctgtccaagcccggttga

SEQ ID NO: 12159 - DNA, 18 bp, synthetic construct
  misc_feature 1..18: note = Description of Artificial Sequence: Synthetic Antisense oligonucleotide
  modified_base 1: mod_base = OTHER; note = 5-methyl
  modified_base 5..6: mod_base = OTHER; note = 5-methyl
  modified_base 10..12: mod_base = OTHER; note = 5-methyl
  modified_base 1: mod_base = OTHER; note = bicyclic nucleic acid (BNA)
  modified_base 5: mod_base = OTHER; note = bicyclic nucleic acid (BNA)
  modified_base 10: mod_base = OTHER; note = bicyclic nucleic acid (BNA)
  source 1..18: mol_type = other DNA
ctgtccaagcccggttga

SEQ ID NO: 12160 - DNA, 18 bp, synthetic construct
  misc_feature 1..18: note = Description of Artificial Sequence: Synthetic Antisense oligonucleotide
  modified_base 1: mod_base = OTHER; note = 5-methyl
  modified_base 5..6: mod_base = OTHER; note = 5-methyl
  modified_base 10..12: mod_base = OTHER; note = 5-methyl
  modified_base 1: mod_base = OTHER; note = bicyclic nucleic acid (BNA)
  modified_base 3: mod_base = OTHER; note = bicyclic nucleic acid (BNA)
  modified_base 10: mod_base = OTHER; note = bicyclic nucleic acid (BNA)
  source 1..18: mol_type = other DNA
ctgtccaagcccggttga

SEQ ID NO: 12161 - DNA, 18 bp, synthetic construct
  misc_feature 1..18: note = Description of Artificial Sequence: Synthetic Antisense oligonucleotide
  modified_base 1: mod_base = OTHER; note = 5-methyl
  modified_base 5..6: mod_base = OTHER; note = 5-methyl
  modified_base 10..12: mod_base = OTHER; note = 5-methyl
  modified_base 1: mod_base = OTHER; note = bicyclic nucleic acid (BNA)
  modified_base 13..14: mod_base = OTHER; note = bicyclic nucleic acid (BNA)
  source 1..18: mol_type = other DNA
ctgtccaagcccggttga

SEQ ID NO: 12162 - DNA, 18 bp, synthetic construct
  misc_feature 1..18: note = Description of Artificial Sequence: Synthetic Antisense oligonucleotide
  modified_base 1: mod_base = OTHER; note = 5-methyl
  modified_base 5..6: mod_base = OTHER; note = 5-methyl
  modified_base 10..12: mod_base = OTHER; note = 5-methyl
  modified_base 1: mod_base = OTHER; note = bicyclic nucleic acid (BNA)
  modified_base 6: mod_base = OTHER; note = bicyclic nucleic acid (BNA)
  modified_base 13: mod_base = OTHER; note = bicyclic nucleic acid (BNA)
  source 1..18: mol_type = other DNA
ctgtccaagcccggttga

SEQ ID NO: 12163 - DNA, 18 bp, synthetic construct
  misc_feature 1..18: note = Description of Artificial Sequence: Synthetic Antisense oligonucleotide
  modified_base 1: mod_base = OTHER; note = 5-methyl
  modified_base 5..6: mod_base = OTHER; note = 5-methyl
  modified_base 10..12: mod_base = OTHER; note = 5-methyl
  modified_base 1: mod_base = OTHER; note = bicyclic nucleic acid (BNA)
  modified_base 9: mod_base = OTHER; note = bicyclic nucleic acid (BNA)
  modified_base 11: mod_base = OTHER; note = bicyclic nucleic acid (BNA)
  source 1..18: mol_type = other DNA
ctgtccaagcccggttga

SEQ ID NO: 12164 - DNA, 18 bp, synthetic construct
  misc_feature 1..18: note = Description of Artificial Sequence: Synthetic Antisense oligonucleotide
  modified_base 1: mod_base = OTHER; note = 5-methyl
  modified_base 5..6: mod_base = OTHER; note = 5-methyl
  modified_base 10..12: mod_base = OTHER; note = 5-methyl
  modified_base 1: mod_base = OTHER; note = bicyclic nucleic acid (BNA)
  modified_base 14: mod_base = OTHER; note = bicyclic nucleic acid (BNA)
  modified_base 17: mod_base = OTHER; note = bicyclic nucleic acid (BNA)
  source 1..18: mol_type = other DNA
ctgtccaagcccggttga

SEQ ID NO: 12165 - DNA, 18 bp, synthetic construct
  misc_feature 1..18: note = Description of Artificial Sequence: Synthetic Antisense oligonucleotide
  modified_base 1: mod_base = OTHER; note = 5-methyl
  modified_base 5..6: mod_base = OTHER; note = 5-methyl
  modified_base 10..12: mod_base = OTHER; note = 5-methyl
  modified_base 1: mod_base = OTHER; note = bicyclic nucleic acid (BNA)
  modified_base 11: mod_base = OTHER; note = bicyclic nucleic acid (BNA)
  modified_base 13: mod_base = OTHER; note = bicyclic nucleic acid (BNA)
  source 1..18: mol_type = other DNA
ctgtccaagcccggttga

SEQ ID NO: 12166 - DNA, 18 bp, synthetic construct
  misc_feature 1..18: note = Description of Artificial Sequence: Synthetic Antisense oligonucleotide
  modified_base 1: mod_base = OTHER; note = 5-methyl
  modified_base 5..6: mod_base = OTHER; note = 5-methyl
  modified_base 10..12: mod_base = OTHER; note = 5-methyl
  modified_base 1: mod_base = OTHER; note = bicyclic nucleic acid (BNA)
  modified_base 5: mod_base = OTHER; note = bicyclic nucleic acid (BNA)
  modified_base 14: mod_base = OTHER; note = bicyclic nucleic acid (BNA)
  source 1..18: mol_type = other DNA
ctgtccaagcccggttga

SEQ ID NO: 12167 - DNA, 18 bp, synthetic construct
  misc_feature 1..18: note = Description of Artificial Sequence: Synthetic Antisense oligonucleotide
  modified_base 1: mod_base = OTHER; note = 5-methyl
  modified_base 5..6: mod_base = OTHER; note = 5-methyl
  modified_base 10..12: mod_base = OTHER; note = 5-methyl
  modified_base 1: mod_base = OTHER; note = bicyclic nucleic acid (BNA)
  modified_base 3: mod_base = OTHER; note = bicyclic nucleic acid (BNA)
  modified_base 14: mod_base = OTHER; note = bicyclic nucleic acid (BNA)
  source 1..18: mol_type = other DNA
ctgtccaagcccggttga

SEQ ID NO: 12168 - DNA, 18 bp, synthetic construct
  misc_feature 1..18: note = Description of Artificial Sequence: Synthetic Antisense oligonucleotide
  modified_base 1: mod_base = OTHER; note = 5-methyl
  modified_base 5..6: mod_base = OTHER; note = 5-methyl
  modified_base 10..12: mod_base = OTHER; note = 5-methyl
  modified_base 1: mod_base = OTHER; note = bicyclic nucleic acid (BNA)
  modified_base 10: mod_base = OTHER; note = bicyclic nucleic acid (BNA)
  modified_base 12: mod_base = OTHER; note = bicyclic nucleic acid (BNA)
  source 1..18: mol_type = other DNA
ctgtccaagcccggttga

SEQ ID NO: 12169 - DNA, 18 bp, synthetic construct
  misc_feature 1..18: note = Description of Artificial Sequence: Synthetic Antisense oligonucleotide
  modified_base 1: mod_base = OTHER; note = 5-methyl
  modified_base 5..6: mod_base = OTHER; note = 5-methyl
  modified_base 10..12: mod_base = OTHER; note = 5-methyl
  modified_base 1: mod_base = OTHER; note = bicyclic nucleic acid (BNA)
  modified_base 9: mod_base = OTHER; note = bicyclic nucleic acid (BNA)
  modified_base 17: mod_base = OTHER; note = bicyclic nucleic acid (BNA)
  source 1..18: mol_type = other DNA
ctgtccaagcccggttga

SEQ ID NO: 12170 - DNA, 18 bp, synthetic construct
  misc_feature 1..18: note = Description of Artificial Sequence: Synthetic Antisense oligonucleotide
  modified_base 1: mod_base = OTHER; note = 5-methyl
  modified_base 5..6: mod_base = OTHER; note = 5-methyl
  modified_base 10..12: mod_base = OTHER; note = 5-methyl
  modified_base 1: mod_base = OTHER; note = bicyclic nucleic acid (BNA)
  modified_base 12: mod_base = OTHER; note = bicyclic nucleic acid (BNA)
  modified_base 14: mod_base = OTHER; note = bicyclic nucleic acid (BNA)
  source 1..18: mol_type = other DNA
ctgtccaagcccggttga

SEQ ID NO: 12171 - DNA, 18 bp, synthetic construct
  misc_feature 1..18: note = Description of Artificial Sequence: Synthetic Antisense oligonucleotide
  modified_base 1: mod_base = OTHER; note = 5-methyl
  modified_base 5..6: mod_base = OTHER; note = 5-methyl
  modified_base 10..12: mod_base = OTHER; note = 5-methyl
  modified_base 1: mod_base = OTHER; note = bicyclic nucleic acid (BNA)
  modified_base 5: mod_base = OTHER; note = bicyclic nucleic acid (BNA)
  modified_base 11: mod_base = OTHER; note = bicyclic nucleic acid (BNA)
  source 1..18: mol_type = other DNA
ctgtccaagcccggttga

SEQ ID NO: 12172 - DNA, 18 bp, synthetic construct
  misc_feature 1..18: note = Description of Artificial Sequence: Synthetic Antisense oligonucleotide
  modified_base 1: mod_base = OTHER; note = 5-methyl
  modified_base 5..6: mod_base = OTHER; note = 5-methyl
  modified_base 10..12: mod_base = OTHER; note = 5-methyl
  modified_base 1: mod_base = OTHER; note = bicyclic nucleic acid (BNA)
  modified_base 3: mod_base = OTHER; note = bicyclic nucleic acid (BNA)
  modified_base 17: mod_base = OTHER; note = bicyclic nucleic acid (BNA)
  source 1..18: mol_type = other DNA
ctgtccaagcccggttga

SEQ ID NO: 12173 - DNA, 18 bp, synthetic construct
  misc_feature 1..18: note = Description of Artificial Sequence: Synthetic Antisense oligonucleotide
  modified_base 1: mod_base = OTHER; note = 5-methyl
  modified_base 5..6: mod_base = OTHER; note = 5-methyl
  modified_base 10..12: mod_base = OTHER; note = 5-methyl
  modified_base 1: mod_base = OTHER; note = bicyclic nucleic acid (BNA)
  modified_base 6: mod_base = OTHER; note = bicyclic nucleic acid (BNA)
  modified_base 12: mod_base = OTHER; note = bicyclic nucleic acid (BNA)
  source 1..18: mol_type = other DNA
ctgtccaagcccggttga

SEQ ID NO: 12174 - DNA, 18 bp, synthetic construct
  misc_feature 1..18: note = Description of Artificial Sequence: Synthetic Antisense oligonucleotide
  modified_base 1: mod_base = OTHER; note = 5-methyl
  modified_base 5..6: mod_base = OTHER; note = 5-methyl
  modified_base 10..12: mod_base = OTHER; note = 5-methyl
  modified_base 1: mod_base = OTHER; note = bicyclic nucleic acid (BNA)
  modified_base 5..6: mod_base = OTHER; note = bicyclic nucleic acid (BNA)
  source 1..18: mol_type = other DNA
ctgtccaagcccggttga

SEQ ID NO: 12175 - DNA, 18 bp, synthetic construct
  misc_feature 1..18: note = Description of Artificial Sequence: Synthetic Antisense oligonucleotide
  modified_base 1: mod_base = OTHER; note = 5-methyl
  modified_base 5..6: mod_base = OTHER; note = 5-methyl
  modified_base 10..12: mod_base = OTHER; note = 5-methyl
  modified_base 1: mod_base = OTHER; note = bicyclic nucleic acid (BNA)
  modified_base 11: mod_base = OTHER; note = bicyclic nucleic acid (BNA)
  modified_base 14: mod_base = OTHER; note = bicyclic nucleic acid (BNA)
  source 1..18: mol_type = other DNA
ctgtccaagcccggttga

SEQ ID NO: 12176 - DNA, 18 bp, synthetic construct
  misc_feature 1..18: note = Description of Artificial Sequence: Synthetic Antisense oligonucleotide
  modified_base 1: mod_base = OTHER; note = 5-methyl
  modified_base 5..6: mod_base = OTHER; note = 5-methyl
  modified_base 10..12: mod_base = OTHER; note = 5-methyl
  modified_base 1: mod_base = OTHER; note = bicyclic nucleic acid (BNA)
  modified_base 9: mod_base = OTHER; note = bicyclic nucleic acid (BNA)
  modified_base 12: mod_base = OTHER; note = bicyclic nucleic acid (BNA)
  source 1..18: mol_type = other DNA
ctgtccaagcccggttga

SEQ ID NO: 12177 - DNA, 18 bp, synthetic construct
  misc_feature 1..18: note = Description of Artificial Sequence: Synthetic Antisense oligonucleotide
  modified_base 1: mod_base = OTHER; note = 5-methyl
  modified_base 5..6: mod_base = OTHER; note = 5-methyl
  modified_base 10..12: mod_base = OTHER; note = 5-methyl
  modified_base 1: mod_base = OTHER; note = bicyclic nucleic acid (BNA)
  modified_base 5: mod_base = OTHER; note = bicyclic nucleic acid (BNA)
  modified_base 17: mod_base = OTHER; note = bicyclic nucleic acid (BNA)
  source 1..18: mol_type = other DNA
ctgtccaagcccggttga

SEQ ID NO: 12178 - DNA, 18 bp, synthetic construct
  misc_feature 1..18: note = Description of Artificial Sequence: Synthetic Antisense oligonucleotide
  modified_base 1: mod_base = OTHER; note = 5-methyl
  modified_base 5..6: mod_base = OTHER; note = 5-methyl
  modified_base 10..12: mod_base = OTHER; note = 5-methyl
  modified_base 1: mod_base = OTHER; note = bicyclic nucleic acid (BNA)
  modified_base 3: mod_base = OTHER; note = bicyclic nucleic acid (BNA)
  modified_base 11: mod_base = OTHER; note = bicyclic nucleic acid (BNA)
  source 1..18: mol_type = other DNA
ctgtccaagcccggttga

SEQ ID NO: 12179 - DNA, 18 bp, synthetic construct
  misc_feature 1..18: note = Description of Artificial Sequence: Synthetic Antisense oligonucleotide
  modified_base 1: mod_base = OTHER; note = 5-methyl
  modified_base 5..6: mod_base = OTHER; note = 5-methyl
  modified_base 10..12: mod_base = OTHER; note = 5-methyl
  modified_base 1: mod_base = OTHER; note = bicyclic nucleic acid (BNA)
  modified_base 10..11: mod_base = OTHER; note = bicyclic nucleic acid (BNA)
  source 1..18: mol_type = other DNA
ctgtccaagcccggttga

SEQ ID NO: 12180 - DNA, 18 bp, synthetic construct
  misc_feature 1..18: note = Description of Artificial Sequence: Synthetic Antisense oligonucleotide
  modified_base 1: mod_base = OTHER; note = 5-methyl
  modified_base 5..6: mod_base = OTHER; note = 5-methyl
  modified_base 10..12: mod_base = OTHER; note = 5-methyl
  modified_base 1: mod_base = OTHER; note = bicyclic nucleic acid (BNA)
  modified_base 10: mod_base = OTHER; note = bicyclic nucleic acid (BNA)
  modified_base 17: mod_base = OTHER; note = bicyclic nucleic acid (BNA)
  source 1..18: mol_type = other DNA
ctgtccaagcccggttga

SEQ ID NO: 12181 - DNA, 18 bp, synthetic construct
  misc_feature 1..18: note = Description of Artificial Sequence: Synthetic Antisense oligonucleotide
  modified_base 1: mod_base = OTHER; note = 5-methyl
  modified_base 5..6: mod_base = OTHER; note = 5-methyl
  modified_base 10..12: mod_base = OTHER; note = 5-methyl
  modified_base 1: mod_base = OTHER; note = bicyclic nucleic acid (BNA)
  modified_base 12..13: mod_base = OTHER; note = bicyclic nucleic acid (BNA)
  source 1..18: mol_type = other DNA
ctgtccaagcccggttga

SEQ ID NO: 12182 - DNA, 18 bp, synthetic construct
  misc_feature 1..18: note = Description of Artificial Sequence: Synthetic Antisense oligonucleotide
  modified_base 1: mod_base = OTHER; note = 5-methyl
  modified_base 5..6: mod_base = OTHER; note = 5-methyl
  modified_base 10..12: mod_base = OTHER; note = 5-methyl
  modified_base 1: mod_base = OTHER; note = bicyclic nucleic acid (BNA)
  modified_base 5: mod_base = OTHER; note = bicyclic nucleic acid (BNA)
  modified_base 12: mod_base = OTHER; note = bicyclic nucleic acid (BNA)
  source 1..18: mol_type = other DNA
ctgtccaagcccggttga

SEQ ID NO: 12183 - DNA, 18 bp, synthetic construct
  misc_feature 1..18: note = Description of Artificial Sequence: Synthetic Antisense oligonucleotide
  modified_base 1: mod_base = OTHER; note = 5-methyl
  modified_base 5..6: mod_base = OTHER; note = 5-methyl
  modified_base 10..12: mod_base = OTHER; note = 5-methyl
  modified_base 1: mod_base = OTHER; note = bicyclic nucleic acid (BNA)
  modified_base 10: mod_base = OTHER; note = bicyclic nucleic acid (BNA)
  modified_base 14: mod_base = OTHER; note = bicyclic nucleic acid (BNA)
  source 1..18: mol_type = other DNA
ctgtccaagcccggttga

SEQ ID NO: 12184 - DNA, 18 bp, synthetic construct
  misc_feature 1..18: note = Description of Artificial Sequence: Synthetic Antisense oligonucleotide
  modified_base 1: mod_base = OTHER; note = 5-methyl
  modified_base 5..6: mod_base = OTHER; note = 5-methyl
  modified_base 10..12: mod_base = OTHER; note = 5-methyl
  modified_base 1: mod_base = OTHER; note = bicyclic nucleic acid (BNA)
  modified_base 6: mod_base = OTHER; note = bicyclic nucleic acid (BNA)
  modified_base 11: mod_base = OTHER; note = bicyclic nucleic acid (BNA)
  source 1..18: mol_type = other DNA
ctgtccaagcccggttga

SEQ ID NO: 12185 - DNA, 18 bp, synthetic construct
  misc_feature 1..18: note = Description of Artificial Sequence: Synthetic Antisense oligonucleotide
  modified_base 1: mod_base = OTHER; note = 5-methyl
  modified_base 5..6: mod_base = OTHER; note = 5-methyl
  modified_base 10..12: mod_base = OTHER; note = 5-methyl
  modified_base 1: mod_base = OTHER; note = bicyclic nucleic acid (BNA)
  modified_base 6: mod_base = OTHER; note = bicyclic nucleic acid (BNA)
  modified_base 17: mod_base = OTHER; note = bicyclic nucleic acid (BNA)
  source 1..18: mol_type = other DNA
ctgtccaagcccggttga

SEQ ID NO: 12186 - DNA, 18 bp, synthetic construct
  misc_feature 1..18: note = Description of Artificial Sequence: Synthetic Antisense oligonucleotide
  modified_base 1: mod_base = OTHER; note = 5-methyl
  modified_base 5..6: mod_base = OTHER; note = 5-methyl
  modified_base 10..12: mod_base = OTHER; note = 5-methyl
  modified_base 1: mod_base = OTHER; note = bicyclic nucleic acid (BNA)
  modified_base 9: mod_base = OTHER; note = bicyclic nucleic acid (BNA)
  modified_base 13: mod_base = OTHER; note = bicyclic nucleic acid (BNA)
  source 1..18: mol_type = other DNA
ctgtccaagcccggttga

SEQ ID NO: 12187 - DNA, 18 bp, synthetic construct
  misc_feature 1..18: note = Description of Artificial Sequence: Synthetic Antisense oligonucleotide
  modified_base 1: mod_base = OTHER; note = 5-methyl
  modified_base 5..6: mod_base = OTHER; note = 5-methyl
  modified_base 10..12: mod_base = OTHER; note = 5-methyl
  modified_base 1: mod_base = OTHER; note = bicyclic nucleic acid (BNA)
  modified_base 11: mod_base = OTHER; note = bicyclic nucleic acid (BNA)
  modified_base 17: mod_base = OTHER; note = bicyclic nucleic acid (BNA)
  source 1..18: mol_type = other DNA
ctgtccaagcccggttga

SEQ ID NO: 12188 - DNA, 18 bp, synthetic construct
  misc_feature 1..18: note = Description of Artificial Sequence: Synthetic Antisense oligonucleotide
  modified_base 1: mod_base = OTHER; note = 5-methyl
  modified_base 5..6: mod_base = OTHER; note = 5-methyl
  modified_base 10..12: mod_base = OTHER; note = 5-methyl
  modified_base 1: mod_base = OTHER; note = bicyclic nucleic acid (BNA)
  modified_base 3: mod_base = OTHER; note = bicyclic nucleic acid (BNA)
  modified_base 12: mod_base = OTHER; note = bicyclic nucleic acid (BNA)
  source 1..18: mol_type = other DNA
ctgtccaagcccggttga

SEQ ID NO: 12189 - DNA, 18 bp, synthetic construct
  misc_feature 1..18: note = Description of Artificial Sequence: Synthetic Antisense oligonucleotide
  modified_base 1: mod_base = OTHER; note = 5-methyl
  modified_base 5..6: mod_base = OTHER; note = 5-methyl
  modified_base 10..12: mod_base = OTHER; note = 5-methyl
  modified_base 1: mod_base = OTHER; note = bicyclic nucleic acid (BNA)
  modified_base 3: mod_base = OTHER; note = bicyclic nucleic acid (BNA)
  modified_base 5: mod_base = OTHER; note = bicyclic nucleic acid (BNA)
  source 1..18: mol_type = other DNA
ctgtccaagcccggttga

SEQ ID NO: 12190 - DNA, 18 bp, synthetic construct
  misc_feature 1..18: note = Description of Artificial Sequence: Synthetic Antisense oligonucleotide
  modified_base 1: mod_base = OTHER; note = 5-methyl
  modified_base 5..6: mod_base = OTHER; note = 5-methyl
  modified_base 10..12: mod_base = OTHER; note = 5-methyl
  modified_base 1: mod_base = OTHER; note = bicyclic nucleic acid (BNA)
  modified_base 10: mod_base = OTHER; note = bicyclic nucleic acid (BNA)
  modified_base 13: mod_base = OTHER; note = bicyclic nucleic acid (BNA)
  source 1..18: mol_type = other DNA
ctgtccaagcccggttga

SEQ ID NO: 12191 - DNA, 20 bp, synthetic construct
  misc_feature 1..20: note = Description of Artificial Sequence: Synthetic Antisense oligonucleotide
  modified_base 1: mod_base = OTHER; note = bicyclic nucleic acid (BNA)
  modified_base 9: mod_base = OTHER; note = bicyclic nucleic acid (BNA)
  modified_base 2: mod_base = OTHER; note = 5-methyl
  modified_base 14: mod_base = OTHER; note = 5-methyl
  modified_base 19: mod_base = OTHER; note = 5-methyl
  source 1..20: mol_type = other DNA
tcaaggaagatggcatttct

SEQ ID NO: 12192 - DNA, 20 bp, synthetic construct
  misc_feature 1..20: note = Description of Artificial Sequence: Synthetic Antisense oligonucleotide
  modified_base 1: mod_base = OTHER; note = bicyclic nucleic acid (BNA)
  modified_base 5: mod_base = OTHER; note = bicyclic nucleic acid (BNA)
  modified_base 2: mod_base = OTHER; note = 5-methyl
  modified_base 14: mod_base = OTHER; note = 5-methyl
  modified_base 19: mod_base = OTHER; note = 5-methyl
  source 1..20: mol_type = other DNA
tcaaggaagatggcatttct

SEQ ID NO: 12193 - DNA, 20 bp, synthetic construct
  misc_feature 1..20: note = Description of Artificial Sequence: Synthetic Antisense oligonucleotide
  modified_base 1: mod_base = OTHER; note = bicyclic nucleic acid (BNA)
  modified_base 6: mod_base = OTHER; note = bicyclic nucleic acid (BNA)
  modified_base 2: mod_base = OTHER; note = 5-methyl
  modified_base 14: mod_base = OTHER; note = 5-methyl
  modified_base 19: mod_base = OTHER; note = 5-methyl
  source 1..20: mol_type = other DNA
tcaaggaagatggcatttct

SEQ ID NO: 12194 - DNA, 20 bp, synthetic construct
  misc_feature 1..20: note = Description of Artificial Sequence: Synthetic Antisense oligonucleotide
  modified_base 1: mod_base = OTHER; note = bicyclic nucleic acid (BNA)
  modified_base 12: mod_base = OTHER; note = bicyclic nucleic acid (BNA)
  modified_base 2: mod_base = OTHER; note = 5-methyl
  modified_base 14: mod_base = OTHER; note = 5-methyl
  modified_base 19: mod_base = OTHER; note = 5-methyl
  source 1..20: mol_type = other DNA
tcaaggaagatggcatttct

SEQ ID NO: 12195 - DNA, 20 bp, synthetic construct
  misc_feature 1..20: note = Description of Artificial Sequence: Synthetic Antisense oligonucleotide
  modified_base 1: mod_base = OTHER; note = bicyclic nucleic acid (BNA)
  modified_base 13: mod_base = OTHER; note = bicyclic nucleic acid (BNA)
  modified_base 2: mod_base = OTHER; note = 5-methyl
  modified_base 14: mod_base = OTHER; note = 5-methyl
  modified_base 19: mod_base = OTHER; note = 5-methyl
  source 1..20: mol_type = other DNA
tcaaggaagatggcatttct

SEQ ID NO: 12196 - DNA, 20 bp, synthetic construct
  misc_feature 1..20: note = Description of Artificial Sequence: Synthetic Antisense oligonucleotide
  modified_base 1: mod_base = OTHER; note = bicyclic nucleic acid (BNA)
  modified_base 19: mod_base = OTHER; note = bicyclic nucleic acid (BNA)
  modified_base 2: mod_base = OTHER; note = 5-methyl
  modified_base 14: mod_base = OTHER; note = 5-methyl
  modified_base 19: mod_base = OTHER; note = 5-methyl
  source 1..20: mol_type = other DNA
tcaaggaagatggcatttct

SEQ ID NO: 12197 - DNA, 20 bp, synthetic construct
  misc_feature 1..20: note = Description of Artificial Sequence: Synthetic Antisense oligonucleotide
  modified_base 1: mod_base = OTHER; note = bicyclic nucleic acid (BNA)
  modified_base 14: mod_base = OTHER; note = bicyclic nucleic acid (BNA)
  modified_base 2: mod_base = OTHER; note = 5-methyl
  modified_base 14: mod_base = OTHER; note = 5-methyl
  modified_base 19: mod_base = OTHER; note = 5-methyl
  source 1..20: mol_type = other DNA
tcaaggaagatggcatttct

SEQ ID NO: 12198 - DNA, 22 bp, synthetic construct
  misc_feature 1..22: note = Description of Artificial Sequence: Synthetic Antisense oligonucleotide
  modified_base 1: mod_base = OTHER; note = bicyclic nucleic acid (BNA)
  modified_base 9: mod_base = OTHER; note = bicyclic nucleic acid (BNA)
  modified_base 2: mod_base = OTHER; note = 5-methyl
  modified_base 14: mod_base = OTHER; note = 5-methyl
  modified_base 19: mod_base = OTHER; note = 5-methyl
  source 1..22: mol_type = other DNA
tcaaggaagatggcatttctag

SEQ ID NO: 12199 - DNA, 22 bp, synthetic construct
  misc_feature 1..22: note = Description of Artificial Sequence: Synthetic Antisense oligonucleotide
  modified_base 1: mod_base = OTHER; note = bicyclic nucleic acid (BNA)
  modified_base 5: mod_base = OTHER; note = bicyclic nucleic acid (BNA)
  modified_base 2: mod_base = OTHER; note = 5-methyl
  modified_base 14: mod_base = OTHER; note = 5-methyl
  modified_base 19: mod_base = OTHER; note = 5-methyl
  source 1..22: mol_type = other DNA
tcaaggaagatggcatttctag

SEQ ID NO: 12200 - DNA, 22 bp, synthetic construct
  misc_feature 1..22: note = Description of Artificial Sequence: Synthetic Antisense oligonucleotide
  modified_base 1: mod_base = OTHER; note = bicyclic nucleic acid (BNA)
  modified_base 6: mod_base = OTHER; note = bicyclic nucleic acid (BNA)
  modified_base 2: mod_base = OTHER; note = 5-methyl
  modified_base 14: mod_base = OTHER; note = 5-methyl
  modified_base 19: mod_base = OTHER; note = 5-methyl
  source 1..22: mol_type = other DNA
tcaaggaagatggcatttctag

SEQ ID NO: 12201 - DNA, 22 bp, synthetic construct
  misc_feature 1..22: note = Description of Artificial Sequence: Synthetic Antisense oligonucleotide
  modified_base 1: mod_base = OTHER; note = bicyclic nucleic acid (BNA)
  modified_base 12: mod_base = OTHER; note = bicyclic nucleic acid (BNA)
  modified_base 2: mod_base = OTHER; note = 5-methyl
  modified_base 14: mod_base = OTHER; note = 5-methyl
  modified_base 19: mod_base = OTHER; note = 5-methyl
  source 1..22: mol_type = other DNA
tcaaggaagatggcatttctag

SEQ ID NO: 12202 - DNA, 22 bp, synthetic construct
  misc_feature 1..22: note = Description of Artificial Sequence: Synthetic Antisense oligonucleotide
  modified_base 1: mod_base = OTHER; note = bicyclic nucleic acid (BNA)
  modified_base 13: mod_base = OTHER; note = bicyclic nucleic acid (BNA)
  modified_base 2: mod_base = OTHER; note = 5-methyl
  modified_base 14: mod_base = OTHER; note = 5-methyl
  modified_base 19: mod_base = OTHER; note = 5-methyl
  source 1..22: mol_type = other DNA
tcaaggaagatggcatttctag

SEQ ID NO: 12203 - DNA, 22 bp, synthetic construct
  misc_feature 1..22: note = Description of Artificial Sequence: Synthetic Antisense oligonucleotide
  modified_base 1: mod_base = OTHER; note = bicyclic nucleic acid (BNA)
  modified_base 19: mod_base = OTHER; note = bicyclic nucleic acid (BNA)
  modified_base 2: mod_base = OTHER; note = 5-methyl
  modified_base 14: mod_base = OTHER; note = 5-methyl
  modified_base 19: mod_base = OTHER; note = 5-methyl
  source 1..22: mol_type = other DNA
tcaaggaagatggcatttctag

SEQ ID NO: 12204 - DNA, 22 bp, synthetic construct
  misc_feature 1..22: note = Description of Artificial Sequence: Synthetic Antisense oligonucleotide
  modified_base 1: mod_base = OTHER; note = bicyclic nucleic acid (BNA)
  modified_base 14: mod_base = OTHER; note = bicyclic nucleic acid (BNA)
  modified_base 2: mod_base = OTHER; note = 5-methyl
  modified_base 14: mod_base = OTHER; note = 5-methyl
  modified_base 19: mod_base = OTHER; note = 5-methyl
  source 1..22: mol_type = other DNA
tcaaggaagatggcatttctag

SEQ ID NO: 12205 - DNA, 20 bp, synthetic construct
  misc_feature 1..20: note = Description of Artificial Sequence: Synthetic Antisense oligonucleotide
  modified_base 1: mod_base = OTHER; note = bicyclic nucleic acid (BNA)
  modified_base 9: mod_base = OTHER; note = bicyclic nucleic acid (BNA)
  modified_base 14: mod_base = OTHER; note = bicyclic nucleic acid (BNA)
  modified_base 2: mod_base = OTHER; note = 5-methyl
  modified_base 14: mod_base = OTHER; note = 5-methyl
  modified_base 19: mod_base = OTHER; note = 5-methyl
  source 1..20: mol_type = other DNA
tcaaggaagatggcatttct

SEQ ID NO: 12206 - DNA, 20 bp, synthetic construct
  misc_feature 1..20: note = Description of Artificial Sequence: Synthetic Antisense oligonucleotide
  modified_base 1: mod_base = OTHER; note = bicyclic nucleic acid (BNA)
  modified_base 5: mod_base = OTHER; note = bicyclic nucleic acid (BNA)
  modified_base 9: mod_base = OTHER; note = bicyclic nucleic acid (BNA)
  modified_base 2: mod_base = OTHER; note = 5-methyl
  modified_base 14: mod_base = OTHER; note = 5-methyl
  modified_base 19: mod_base = OTHER; note = 5-methyl
  source 1..20: mol_type = other DNA
tcaaggaagatggcatttct

SEQ ID NO: 12207 - DNA, 20 bp, synthetic construct
  misc_feature 1..20: note = Description of Artificial Sequence: Synthetic Antisense oligonucleotide
  modified_base 1: mod_base = OTHER; note = bicyclic nucleic acid (BNA)
  modified_base 5: mod_base = OTHER; note = bicyclic nucleic acid (BNA)
  modified_base 19: mod_base = OTHER; note = bicyclic nucleic acid (BNA)
  modified_base 2: mod_base = OTHER; note = 5-methyl
  modified_base 14: mod_base = OTHER; note = 5-methyl
  modified_base 19: mod_base = OTHER; note = 5-methyl
  source 1..20: mol_type = other DNA
tcaaggaagatggcatttct

SEQ ID NO: 12208 - DNA, 20 bp, synthetic construct
  misc_feature 1..20: note = Description of Artificial Sequence: Synthetic Antisense oligonucleotide
  modified_base 1: mod_base = OTHER; note = bicyclic nucleic acid (BNA)
  modified_base 6: mod_base = OTHER; note = bicyclic nucleic acid (BNA)
  modified_base 14: mod_base = OTHER; note = bicyclic nucleic acid (BNA)
  modified_base 2: mod_base = OTHER; note = 5-methyl
  modified_base 14: mod_base = OTHER; note = 5-methyl
  modified_base 19: mod_base = OTHER; note = 5-methyl
  source 1..20: mol_type = other DNA
tcaaggaagatggcatttct

SEQ ID NO: 12209 - DNA, 20 bp, synthetic construct
  misc_feature 1..20: note = Description of Artificial Sequence: Synthetic Antisense oligonucleotide
  modified_base 1: mod_base = OTHER; note = bicyclic nucleic acid (BNA)
  modified_base 5: mod_base = OTHER; note = bicyclic nucleic acid (BNA)
  modified_base 13: mod_base = OTHER; note = bicyclic nucleic acid (BNA)
  modified_base 2: mod_base = OTHER; note = 5-methyl
  modified_base 14: mod_base = OTHER; note = 5-methyl
  modified_base 19: mod_base = OTHER; note = 5-methyl
  source 1..20: mol_type = other DNA
tcaaggaagatggcatttct

SEQ ID NO: 12210 - DNA, 20 bp, synthetic construct
  misc_feature 1..20: note = Description of Artificial Sequence: Synthetic Antisense oligonucleotide
  modified_base 1: mod_base = OTHER; note = bicyclic nucleic acid (BNA)
  modified_base 6: mod_base = OTHER; note = bicyclic nucleic acid (BNA)
  modified_base 9: mod_base = OTHER; note = bicyclic nucleic acid (BNA)
  modified_base 2: mod_base = OTHER; note = 5-methyl
  modified_base 14: mod_base = OTHER; note = 5-methyl
  modified_base 19: mod_base = OTHER; note = 5-methyl
  source 1..20: mol_type = other DNA
tcaaggaagatggcatttct

SEQ ID NO: 12211 - DNA, 20 bp, synthetic construct
  misc_feature 1..20: note = Description of Artificial Sequence: Synthetic Antisense oligonucleotide
  modified_base 1: mod_base = OTHER; note = bicyclic nucleic acid (BNA)
  modified_base 13..14: mod_base = OTHER; note = bicyclic nucleic acid (BNA)
  modified_base 2: mod_base = OTHER; note = 5-methyl
  modified_base 14: mod_base = OTHER; note = 5-methyl
  modified_base 19: mod_base = OTHER; note = 5-methyl
  source 1..20: mol_type = other DNA
tcaaggaagatggcatttct

SEQ ID NO: 12212 - DNA, 20 bp, synthetic construct
  misc_feature 1..20: note = Description of Artificial Sequence: Synthetic Antisense oligonucleotide
  modified_base 1: mod_base = OTHER; note = bicyclic nucleic acid (BNA)
  modified_base 6: mod_base = OTHER; note = bicyclic nucleic acid (BNA)
  modified_base 13: mod_base = OTHER; note = bicyclic nucleic acid (BNA)
  modified_base 2: mod_base = OTHER; note = 5-methyl
  modified_base 14: mod_base = OTHER; note = 5-methyl
  modified_base 19: mod_base = OTHER; note = 5-methyl
  source 1..20: mol_type = other DNA
tcaaggaagatggcatttct

SEQ ID NO: 12213 - DNA, 20 bp, synthetic construct
  misc_feature 1..20: note = Description of Artificial Sequence: Synthetic Antisense oligonucleotide
  modified_base 1: mod_base = OTHER; note = bicyclic nucleic acid (BNA)
  modified_base 6: mod_base = OTHER; note = bicyclic nucleic acid (BNA)
  modified_base 19: mod_base = OTHER; note = bicyclic nucleic acid (BNA)
  modified_base 2: mod_base = OTHER; note = 5-methyl
  modified_base 14: mod_base = OTHER; note = 5-methyl
  modified_base 19: mod_base = OTHER; note = 5-methyl
  source 1..20: mol_type = other DNA
tcaaggaagatggcatttct

SEQ ID NO: 12214 - DNA, 20 bp, synthetic construct
  misc_feature 1..20: note = Description of Artificial Sequence: Synthetic Antisense oligonucleotide
  modified_base 1: mod_base = OTHER; note = bicyclic nucleic acid (BNA)
  modified_base 5: mod_base = OTHER; note = bicyclic nucleic acid (BNA)
  modified_base 14: mod_base = OTHER; note = bicyclic nucleic acid (BNA)
  modified_base 2: mod_base = OTHER; note = 5-methyl
  modified_base 14: mod_base = OTHER; note = 5-methyl
  modified_base 19: mod_base = OTHER; note = 5-methyl
  source 1..20: mol_type = other DNA
tcaaggaagatggcatttct

SEQ ID NO: 12215 - DNA, 20 bp, synthetic construct
  misc_feature 1..20: note = Description of Artificial Sequence: Synthetic Antisense oligonucleotide
  modified_base 1: mod_base = OTHER; note = bicyclic nucleic acid (BNA)
  modified_base 12: mod_base = OTHER; note = bicyclic nucleic acid (BNA)
  modified_base 19: mod_base = OTHER; note = bicyclic nucleic acid (BNA)
  modified_base 2: mod_base = OTHER; note = 5-methyl
  modified_base 14: mod_base = OTHER; note = 5-methyl
  modified_base 19: mod_base = OTHER; note = 5-methyl
  source 1..20: mol_type = other DNA
tcaaggaagatggcatttct

SEQ ID NO: 12216 - DNA, 20 bp, synthetic construct
  misc_feature 1..20: note = Description of Artificial Sequence: Synthetic Antisense oligonucleotide
  modified_base 1: mod_base = OTHER; note = bicyclic nucleic acid (BNA)
  modified_base 12: mod_base = OTHER; note = bicyclic nucleic acid (BNA)
  modified_base 14: mod_base = OTHER; note = bicyclic nucleic acid (BNA)
  modified_base 2: mod_base = OTHER; note = 5-methyl
  modified_base 14: mod_base = OTHER; note = 5-methyl
  modified_base 19: mod_base = OTHER; note = 5-methyl
  source 1..20: mol_type = other DNA
tcaaggaagatggcatttct

SEQ ID NO: 12217 - DNA, 20 bp, synthetic construct
  misc_feature 1..20: note = Description of Artificial Sequence: Synthetic Antisense oligonucleotide
  modified_base 1: mod_base = OTHER; note = bicyclic nucleic acid (BNA)
  modified_base 6: mod_base = OTHER; note = bicyclic nucleic acid (BNA)
  modified_base 12: mod_base = OTHER; note = bicyclic nucleic acid (BNA)
  modified_base 2: mod_base = OTHER; note = 5-methyl
  modified_base 14: mod_base = OTHER; note = 5-methyl
  modified_base 19: mod_base = OTHER; note = 5-methyl
  source 1..20: mol_type = other DNA
tcaaggaagatggcatttct

SEQ ID NO: 12218 - DNA, 20 bp, synthetic construct
  misc_feature 1..20: note = Description of Artificial Sequence: Synthetic Antisense oligonucleotide
  modified_base 1: mod_base = OTHER; note = bicyclic nucleic acid (BNA)
  modified_base 5..6: mod_base = OTHER; note = bicyclic nucleic acid (BNA)
  modified_base 2: mod_base = OTHER; note = 5-methyl
  modified_base 14: mod_base = OTHER; note = 5-methyl
  modified_base 19: mod_base = OTHER; note = 5-methyl
  source 1..20: mol_type = other DNA
tcaaggaagatggcatttct

SEQ ID NO: 12219 - DNA, 20 bp, synthetic construct
  misc_feature 1..20: note = Description of Artificial Sequence: Synthetic Antisense oligonucleotide
  modified_base 1: mod_base = OTHER; note = bicyclic nucleic acid (BNA)
  modified_base 9: mod_base = OTHER; note = bicyclic nucleic acid (BNA)
  modified_base 12: mod_base = OTHER; note = bicyclic nucleic acid (BNA)
  modified_base 2: mod_base = OTHER; note = 5-methyl
  modified_base 14: mod_base = OTHER; note = 5-methyl
  modified_base 19: mod_base = OTHER; note = 5-methyl
  source 1..20: mol_type = other DNA
tcaaggaagatggcatttct

SEQ ID NO: 12220 - DNA, 20 bp, synthetic construct
  misc_feature 1..20: note = Description of Artificial Sequence: Synthetic Antisense oligonucleotide
  modified_base 1: mod_base = OTHER; note = bicyclic nucleic acid (BNA)
  modified_base 13: mod_base = OTHER; note = bicyclic nucleic acid (BNA)
  modified_base 19: mod_base = OTHER; note = bicyclic nucleic acid (BNA)
  modified_base 2: mod_base = OTHER; note = 5-methyl
  modified_base 14: mod_base = OTHER; note = 5-methyl
  modified_base 19: mod_base = OTHER; note = 5-methyl
  source 1..20: mol_type = other DNA
tcaaggaagatggcatttct

SEQ ID NO: 12221 - DNA, 20 bp, synthetic construct
  misc_feature 1..20: note = Description of Artificial Sequence: Synthetic Antisense oligonucleotide
  modified_base 1: mod_base = OTHER; note = bicyclic nucleic acid (BNA)
  modified_base 12..13: mod_base = OTHER; note = bicyclic nucleic acid (BNA)
  modified_base 2: mod_base = OTHER; note = 5-methyl
  modified_base 14: mod_base = OTHER; note = 5-methyl
  modified_base 19: mod_base = OTHER; note = 5-methyl
  source 1..20: mol_type = other DNA
tcaaggaagatggcatttct

SEQ ID NO: 12222 - DNA, 20 bp, synthetic construct
  misc_feature 1..20: note = Description of Artificial Sequence: Synthetic Antisense oligonucleotide
  modified_base 1: mod_base = OTHER; note = bicyclic nucleic acid (BNA)
  modified_base 5: mod_base = OTHER; note = bicyclic nucleic acid (BNA)
  modified_base 12: mod_base = OTHER; note = bicyclic nucleic acid (BNA)
  modified_base 2: mod_base = OTHER; note = 5-methyl
  modified_base 14: mod_base = OTHER; note = 5-methyl
  modified_base 19: mod_base = OTHER; note = 5-methyl
  source 1..20: mol_type = other DNA
tcaaggaagatggcatttct

SEQ ID NO: 12223 - DNA, 20 bp, synthetic construct
  misc_feature 1..20: note = Description of Artificial Sequence: Synthetic Antisense oligonucleotide
  modified_base 1: mod_base = OTHER; note = bicyclic nucleic acid (BNA)
  modified_base 9: mod_base = OTHER; note = bicyclic nucleic acid (BNA)
  modified_base 13: mod_base = OTHER; note = bicyclic nucleic acid (BNA)
  modified_base 2: mod_base = OTHER; note = 5-methyl
  modified_base 14: mod_base = OTHER; note = 5-methyl
  modified_base 19: mod_base = OTHER; note = 5-methyl
  source 1..20: mol_type = other DNA
tcaaggaagatggcatttct

SEQ ID NO: 12224 - DNA, 20 bp, synthetic construct
  misc_feature 1..20: note = Description of Artificial Sequence: Synthetic Antisense oligonucleotide
  modified_base 1: mod_base = OTHER; note = bicyclic nucleic acid (BNA)
  modified_base 14: mod_base = OTHER; note = bicyclic nucleic acid (BNA)
  modified_base 19: mod_base = OTHER; note = bicyclic nucleic acid (BNA)
  modified_base 2: mod_base = OTHER; note = 5-methyl
  modified_base 14: mod_base = OTHER; note = 5-methyl
  modified_base 19: mod_base = OTHER; note = 5-methyl
  source 1..20: mol_type = other DNA
tcaaggaagatggcatttct

SEQ ID NO: 12225 - DNA, 20 bp, synthetic construct
  misc_feature 1..20: note = Description of Artificial Sequence: Synthetic Antisense oligonucleotide
  modified_base 1: mod_base = OTHER; note = bicyclic nucleic acid (BNA)
  modified_base 9: mod_base = OTHER; note = bicyclic nucleic acid (BNA)
  modified_base 19: mod_base = OTHER; note = bicyclic nucleic acid (BNA)
  modified_base 2: mod_base = OTHER; note = 5-methyl
  modified_base 14: mod_base = OTHER; note = 5-methyl
  modified_base 19: mod_base = OTHER; note = 5-methyl
  source 1..20: mol_type = other DNA
tcaaggaagatggcatttct

SEQ ID NO: 12226 - DNA, 22 bp, synthetic construct
  misc_feature 1..22: note = Description of Artificial Sequence: Synthetic Antisense oligonucleotide
  modified_base 1: mod_base = OTHER; note = bicyclic nucleic acid (BNA)
  modified_base 9: mod_base = OTHER; note = bicyclic nucleic acid (BNA)
  modified_base 14: mod_base = OTHER; note = bicyclic nucleic acid (BNA)
  modified_base 2: mod_base = OTHER; note = 5-methyl
  modified_base 14: mod_base = OTHER; note = 5-methyl
  modified_base 19: mod_base = OTHER; note = 5-methyl
  source 1..22: mol_type = other DNA
tcaaggaagatggcatttctag

SEQ ID NO: 12227 - DNA, 22 bp, synthetic construct
  misc_feature 1..22: note = Description of Artificial Sequence: Synthetic Antisense oligonucleotide
  modified_base 1: mod_base = OTHER; note = bicyclic nucleic acid (BNA)
  modified_base 5: mod_base = OTHER; note = bicyclic nucleic acid (BNA)
  modified_base 9: mod_base = OTHER; note = bicyclic nucleic acid (BNA)
  modified_base 2: mod_base = OTHER; note = 5-methyl
  modified_base 14: mod_base = OTHER; note = 5-methyl
  modified_base 19: mod_base = OTHER; note = 5-methyl
  source 1..22: mol_type = other DNA
tcaaggaagatggcatttctag

SEQ ID NO: 12228 - DNA, 22 bp, synthetic construct
  misc_feature 1..22: note = Description of Artificial Sequence: Synthetic Antisense oligonucleotide
  modified_base 1: mod_base = OTHER; note = bicyclic nucleic acid (BNA)
  modified_base 5: mod_base = OTHER; note = bicyclic nucleic acid (BNA)
  modified_base 19: mod_base = OTHER; note = bicyclic nucleic acid (BNA)
  modified_base 2: mod_base = OTHER; note = 5-methyl
  modified_base 14: mod_base = OTHER; note = 5-methyl
  modified_base 19: mod_base = OTHER; note = 5-methyl
  source 1..22: mol_type = other DNA
tcaaggaagatggcatttctag

SEQ ID NO: 12229 - DNA, 22 bp, synthetic construct
  misc_feature 1..22: note = Description of Artificial Sequence: Synthetic Antisense oligonucleotide
  modified_base 1: mod_base = OTHER; note = bicyclic nucleic acid (BNA)
  modified_base 6: mod_base = OTHER; note = bicyclic nucleic acid (BNA)
  modified_base 14: mod_base = OTHER; note = bicyclic nucleic acid (BNA)
  modified_base 2: mod_base = OTHER; note = 5-methyl
  modified_base 14: mod_base = OTHER; note = 5-methyl
  modified_base 19: mod_base = OTHER; note = 5-methyl
  source 1..22: mol_type = other DNA
tcaaggaagatggcatttctag

SEQ ID NO: 12230 - DNA, 22 bp, synthetic construct
  misc_feature 1..22: note = Description of Artificial Sequence: Synthetic Antisense oligonucleotide
  modified_base 1: mod_base = OTHER; note = bicyclic nucleic acid (BNA)
  modified_base 5: mod_base = OTHER; note = bicyclic nucleic acid (BNA)
  modified_base 13: mod_base = OTHER; note = bicyclic nucleic acid (BNA)
  modified_base 2: mod_base = OTHER; note = 5-methyl
  modified_base 14: mod_base = OTHER; note = 5-methyl
  modified_base 19: mod_base = OTHER; note = 5-methyl
  source 1..22: mol_type = other DNA
tcaaggaagatggcatttctag

SEQ ID NO: 12231 - DNA, 22 bp, synthetic construct
  misc_feature 1..22: note = Description of Artificial Sequence: Synthetic Antisense oligonucleotide
  modified_base 1: mod_base = OTHER; note = bicyclic nucleic acid (BNA)
  modified_base 6: mod_base = OTHER; note = bicyclic nucleic acid (BNA)
  modified_base 9: mod_base = OTHER; note = bicyclic nucleic acid (BNA)
  modified_base 2: mod_base = OTHER; note = 5-methyl
  modified_base 14: mod_base = OTHER; note = 5-methyl
  modified_base 19: mod_base = OTHER; note = 5-methyl
  source 1..22: mol_type = other DNA
tcaaggaagatggcatttctag

SEQ ID NO: 12232 - DNA, 22 bp, synthetic construct
  misc_feature 1..22: note = Description of Artificial Sequence: Synthetic Antisense oligonucleotide
  modified_base 1: mod_base = OTHER; note = bicyclic nucleic acid (BNA)
  modified_base 13..14: mod_base = OTHER; note = bicyclic nucleic acid (BNA)
  modified_base 2: mod_base = OTHER; note = 5-methyl
  modified_base 14: mod_base = OTHER; note = 5-methyl
  modified_base 19: mod_base = OTHER; note = 5-methyl
  source 1..22: mol_type = other DNA
tcaaggaagatggcatttctag

SEQ ID NO: 12233 - DNA, 22 bp, synthetic construct
  misc_feature 1..22: note = Description of Artificial Sequence: Synthetic Antisense oligonucleotide
  modified_base 1: mod_base = OTHER; note = bicyclic nucleic acid (BNA)
  modified_base 6: mod_base = OTHER; note = bicyclic nucleic acid (BNA)
  modified_base 13: mod_base = OTHER; note = bicyclic nucleic acid (BNA)
  modified_base 2: mod_base = OTHER; note = 5-methyl
  modified_base 14: mod_base = OTHER; note = 5-methyl
  modified_base 19: mod_base = OTHER; note = 5-methyl
  source 1..22: mol_type = other DNA
tcaaggaagatggcatttctag

SEQ ID NO: 12234 - DNA, 22 bp, synthetic construct
  misc_feature 1..22: note = Description of Artificial Sequence: Synthetic Antisense oligonucleotide
  modified_base 1: mod_base = OTHER; note = bicyclic nucleic acid (BNA)
  modified_base 6: mod_base = OTHER; note = bicyclic nucleic acid (BNA)
  modified_base 19: mod_base = OTHER; note = bicyclic nucleic acid (BNA)
  modified_base 2: mod_base = OTHER; note = 5-methyl
  modified_base 14: mod_base = OTHER; note = 5-methyl
  modified_base 19: mod_base = OTHER; note = 5-methyl
  source 1..22: mol_type = other DNA
tcaaggaagatggcatttctag

SEQ ID NO: 12235 - DNA, 22 bp, synthetic construct
  misc_feature 1..22: note = Description of Artificial Sequence: Synthetic Antisense oligonucleotide
  modified_base 1: mod_base = OTHER; note = bicyclic nucleic acid (BNA)
  modified_base 5: mod_base = OTHER; note = bicyclic nucleic acid (BNA)
  modified_base 14: mod_base = OTHER; note = bicyclic nucleic acid (BNA)
  modified_base 2: mod_base = OTHER; note = 5-methyl
  modified_base 14: mod_base = OTHER; note = 5-methyl
  modified_base 19: mod_base = OTHER; note = 5-methyl
  source 1..22: mol_type = other DNA
tcaaggaagatggcatttctag

SEQ ID NO: 12236 - DNA, 22 bp, synthetic construct
  misc_feature 1..22: note = Description of Artificial Sequence: Synthetic Antisense oligonucleotide
  modified_base 1: mod_base = OTHER; note = bicyclic nucleic acid (BNA)
  modified_base 12: mod_base = OTHER; note = bicyclic nucleic acid (BNA)
  modified_base 19: mod_base = OTHER; note = bicyclic nucleic acid (BNA)
  modified_base 2: mod_base = OTHER; note = 5-methyl
  modified_base 14: mod_base = OTHER; note = 5-methyl
  modified_base 19: mod_base = OTHER; note = 5-methyl
  source 1..22: mol_type = other DNA
tcaaggaagatggcatttctag

SEQ ID NO: 12237 - DNA, 22 bp, synthetic construct
  misc_feature 1..22: note = Description of Artificial Sequence: Synthetic Antisense oligonucleotide
  modified_base 1: mod_base = OTHER; note = bicyclic nucleic acid (BNA)
  modified_base 12: mod_base = OTHER; note = bicyclic nucleic acid (BNA)
  modified_base 14: mod_base = OTHER; note = bicyclic nucleic acid (BNA)
  modified_base 2: mod_base = OTHER; note = 5-methyl
  modified_base 14: mod_base = OTHER; note = 5-methyl
  modified_base 19: mod_base = OTHER; note = 5-methyl
  source 1..22: mol_type = other DNA
tcaaggaagatggcatttctag

SEQ ID NO: 12238 - DNA, 22 bp, synthetic construct
  misc_feature 1..22: note = Description of Artificial Sequence: Synthetic Antisense oligonucleotide
  modified_base 1: mod_base = OTHER; note = bicyclic nucleic acid (BNA)
  modified_base 6: mod_base = OTHER; note = bicyclic nucleic acid (BNA)
  modified_base 12: mod_base = OTHER; note = bicyclic nucleic acid (BNA)
  modified_base 2: mod_base = OTHER; note = 5-methyl
  modified_base 14: mod_base = OTHER; note = 5-methyl
  modified_base 19: mod_base = OTHER; note = 5-methyl
  source 1..22: mol_type = other DNA
tcaaggaagatggcatttctag

SEQ ID NO: 12239 - DNA, 22 bp, synthetic construct
  misc_feature 1..22: note = Description of Artificial Sequence: Synthetic Antisense oligonucleotide
  modified_base 1: mod_base = OTHER; note = bicyclic nucleic acid (BNA)
  modified_base 5..6: mod_base = OTHER; note = bicyclic nucleic acid (BNA)
  modified_base 2: mod_base = OTHER; note = 5-methyl
  modified_base 14: mod_base = OTHER; note = 5-methyl
  modified_base 19: mod_base = OTHER; note = 5-methyl
  source 1..22: mol_type = other DNA
tcaaggaagatggcatttctag

SEQ ID NO: 12240 - DNA, 22 bp, synthetic construct
  misc_feature 1..22: note = Description of Artificial Sequence: Synthetic Antisense oligonucleotide
  modified_base 1: mod_base = OTHER; note = bicyclic nucleic acid (BNA)
  modified_base 9: mod_base = OTHER; note = bicyclic nucleic acid (BNA)
  modified_base 12: mod_base = OTHER; note = bicyclic nucleic acid (BNA)
  modified_base 2: mod_base = OTHER; note = 5-methyl
  modified_base 14: mod_base = OTHER; note = 5-methyl
  modified_base 19: mod_base = OTHER; note = 5-methyl
  source 1..22: mol_type = other DNA
tcaaggaagatggcatttctag

SEQ ID NO: 12241 - DNA, 22 bp, synthetic construct
  misc_feature 1..22: note = Description of Artificial Sequence: Synthetic Antisense oligonucleotide
  modified_base 1: mod_base = OTHER; note = bicyclic nucleic acid (BNA)
  modified_base 13: mod_base = OTHER; note = bicyclic nucleic acid (BNA)
  modified_base 19: mod_base = OTHER; note = bicyclic nucleic acid (BNA)
  modified_base 2: mod_base = OTHER; note = 5-methyl
  modified_base 14: mod_base = OTHER; note = 5-methyl
  modified_base 19: mod_base = OTHER; note = 5-methyl
  source 1..22: mol_type = other DNA
tcaaggaagatggcatttctag

SEQ ID NO: 12242 - DNA, 22 bp, synthetic construct
  misc_feature 1..22: note = Description of Artificial Sequence: Synthetic Antisense oligonucleotide
  modified_base 1: mod_base = OTHER; note = bicyclic nucleic acid (BNA)
  modified_base 12..13: mod_base = OTHER; note = bicyclic nucleic acid (BNA)
  modified_base 2: mod_base = OTHER; note = 5-methyl
  modified_base 14: mod_base = OTHER; note = 5-methyl
  modified_base 19: mod_base = OTHER; note = 5-methyl
  source 1..22: mol_type = other DNA
tcaaggaagatggcatttctag

SEQ ID NO: 12243 - DNA, 22 bp, synthetic construct
  misc_feature 1..22: note = Description of Artificial Sequence: Synthetic Antisense oligonucleotide
  modified_base 1: mod_base = OTHER; note = bicyclic nucleic acid (BNA)
  modified_base 5: mod_base = OTHER; note = bicyclic nucleic acid (BNA)
  modified_base 12: mod_base = OTHER; note = bicyclic nucleic acid (BNA)
  modified_base 2: mod_base = OTHER; note = 5-methyl
  modified_base 14: mod_base = OTHER; note = 5-methyl
  modified_base 19: mod_base = OTHER; note = 5-methyl
  source 1..22: mol_type = other DNA
tcaaggaagatggcatttctag

SEQ ID NO: 12244 - DNA, 22 bp, synthetic construct
  misc_feature 1..22: note = Description of Artificial Sequence: Synthetic Antisense oligonucleotide
  modified_base 1: mod_base = OTHER; note = bicyclic nucleic acid (BNA)
  modified_base 9: mod_base = OTHER; note = bicyclic nucleic acid (BNA)
  modified_base 13: mod_base = OTHER; note = bicyclic nucleic acid (BNA)
  modified_base 2: mod_base = OTHER; note = 5-methyl
  modified_base 14: mod_base = OTHER; note = 5-methyl
  modified_base 19: mod_base = OTHER; note = 5-methyl
  source 1..22: mol_type = other DNA
tcaaggaagatggcatttctag

SEQ ID NO: 12245 - DNA, 22 bp, synthetic construct
  misc_feature 1..22: note = Description of Artificial Sequence: Synthetic Antisense oligonucleotide
  modified_base 1: mod_base = OTHER; note = bicyclic nucleic acid (BNA)
  modified_base 14: mod_base = OTHER; note = bicyclic nucleic acid (BNA)
  modified_base 19: mod_base = OTHER; note = bicyclic nucleic acid (BNA)
  modified_base 2: mod_base = OTHER; note = 5-methyl
  modified_base 14: mod_base = OTHER; note = 5-methyl
  modified_base 19: mod_base = OTHER; note = 5-methyl
  source 1..22: mol_type = other DNA
tcaaggaagatggcatttctag

SEQ ID NO: 12246 - DNA, 22 bp, synthetic construct
  misc_feature 1..22: note = Description of Artificial Sequence: Synthetic Antisense oligonucleotide
  modified_base 1: mod_base = OTHER; note = bicyclic nucleic acid (BNA)
  modified_base 9: mod_base = OTHER; note = bicyclic nucleic acid (BNA)
  modified_base 19: mod_base = OTHER; note = bicyclic nucleic acid (BNA)
  modified_base 2: mod_base = OTHER; note = 5-methyl
  modified_base 14: mod_base = OTHER; note = 5-methyl
  modified_base 19: mod_base = OTHER; note = 5-methyl
  source 1..22: mol_type = other DNA
tcaaggaagatggcatttctag

SEQ ID NO: 12247 - RNA, 18 nt, synthetic construct
  misc_feature 1..18: note = Description of Artificial Sequence: Synthetic Antisense oligonucleotide
  modified_base 2: mod_base = OTHER; note = bicyclic nucleic acid (BNA)
  modified_base 18: mod_base = OTHER; note = bicyclic nucleic acid (BNA)
  source 1..18: mol_type = other RNA
ggtaagttctgtccaagc

SEQ ID NO: 12248 - RNA, 18 nt, synthetic construct
  misc_feature 1..18: note = Description of Artificial Sequence: Synthetic Antisense oligonucleotide
  modified_base 9: mod_base = OTHER; note = bicyclic nucleic acid (BNA)
  modified_base 18: mod_base = OTHER; note = bicyclic nucleic acid (BNA)
  source 1..18: mol_type = other RNA
ggtaagttctgtccaagc

SEQ ID NO: 12249 - RNA, 18 nt, synthetic construct
  misc_feature 1..18: note = Description of Artificial Sequence: Synthetic Antisense oligonucleotide
  modified_base 11: mod_base = OTHER; note = bicyclic nucleic acid (BNA)
  modified_base 18: mod_base = OTHER; note = bicyclic nucleic acid (BNA)
  source 1..18: mol_type = other RNA
ggtaagttctgtccaagc

SEQ ID NO: 12250 - RNA, 18 nt, synthetic construct
  misc_feature 1..18: note = Description of Artificial Sequence: Synthetic Antisense oligonucleotide
  modified_base 6: mod_base = OTHER; note = bicyclic nucleic acid (BNA)
  modified_base 18: mod_base = OTHER; note = bicyclic nucleic acid (BNA)
  source 1..18: mol_type = other RNA
ggtaagttctgtccaagc

SEQ ID NO: 12251 - RNA, 18 nt, synthetic construct
  misc_feature 1..18: note = Description of Artificial Sequence: Synthetic Antisense oligonucleotide
  modified_base 13: mod_base = OTHER; note = bicyclic nucleic acid (BNA)
  modified_base 18: mod_base = OTHER; note = bicyclic nucleic acid (BNA)
  source 1..18: mol_type = other RNA
ggtaagttctgtccaagc

SEQ ID NO: 12252 - RNA, 18 nt, synthetic construct
  misc_feature 1..18: note = Description of Artificial Sequence: Synthetic Antisense oligonucleotide
  modified_base 14: mod_base = OTHER; note = bicyclic nucleic acid (BNA)
  modified_base 18: mod_base = OTHER; note = bicyclic nucleic acid (BNA)
  source 1..18: mol_type = other RNA
ggtaagttctgtccaagc

SEQ ID NO: 12253 - RNA, 18 nt, synthetic construct
  misc_feature 1..18: note = Description of Artificial Sequence: Synthetic Antisense oligonucleotide
  modified_base 16: mod_base = OTHER; note = bicyclic nucleic acid (BNA)
  modified_base 18: mod_base = OTHER; note = bicyclic nucleic acid (BNA)
  source 1..18: mol_type = other RNA
gtaagttctgtccaagcc

SEQ ID NO: 12254 - RNA, 18 nt, synthetic construct
  misc_feature 1..18: note = Description of Artificial Sequence: Synthetic Antisense oligonucleotide
  modified_base 10: mod_base = OTHER; note = bicyclic nucleic acid (BNA)
  modified_base 18: mod_base = OTHER; note = bicyclic nucleic acid (BNA)
  source 1..18: mol_type = other RNA
gtaagttctgtccaagcc

SEQ ID NO: 12255 - RNA, 18 nt, synthetic construct
  misc_feature 1..18: note = Description of Artificial Sequence: Synthetic Antisense oligonucleotide
  modified_base 5: mod_base = OTHER; note = bicyclic nucleic acid (BNA)
  modified_base 18: mod_base = OTHER; note = bicyclic nucleic acid (BNA)
  source 1..18: mol_type = other RNA
gtaagttctgtccaagcc

SEQ ID NO: 12256 - RNA, 18 nt, synthetic construct
  misc_feature 1..18: note = Description of Artificial Sequence: Synthetic Antisense oligonucleotide
  modified_base 12: mod_base = OTHER; note = bicyclic nucleic acid (BNA)
  modified_base 18: mod_base = OTHER; note = bicyclic nucleic acid (BNA)
  source 1..18: mol_type = other RNA
gtaagttctgtccaagcc

SEQ ID NO: 12257 - RNA, 18 nt, synthetic construct
  misc_feature 1..18: note = Description of Artificial Sequence: Synthetic Antisense oligonucleotide
  modified_base 13: mod_base = OTHER; note = bicyclic nucleic acid (BNA)
  modified_base 18: mod_base = OTHER; note = bicyclic nucleic acid (BNA)
  source 1..18: mol_type = other RNA
gtaagttctgtccaagcc

SEQ ID NO: 12258 - RNA, 18 nt, synthetic construct
  misc_feature 1..18: note = Description of Artificial Sequence: Synthetic Antisense oligonucleotide
  modified_base 8: mod_base = OTHER; note = bicyclic nucleic acid (BNA)
  modified_base 18: mod_base = OTHER; note = bicyclic nucleic acid (BNA)
  source 1..18: mol_type = other RNA
gtaagttctgtccaagcc

SEQ ID NO: 12259 - RNA, 18 nt, synthetic construct
  misc_feature 1..18: note = Description of Artificial Sequence: Synthetic Antisense oligonucleotide
  modified_base 2: mod_base = OTHER; note = bicyclic nucleic acid (BNA)
  modified_base 18: mod_base = OTHER; note = bicyclic nucleic acid (BNA)
  source 1..18: mol_type = other RNA
agtcggtaagttctgtcc

SEQ ID NO: 12260 - RNA, 18 nt, synthetic construct
  misc_feature 1..18: note = Description of Artificial Sequence: Synthetic Antisense oligonucleotide
  modified_base 4: mod_base = OTHER; note = bicyclic nucleic acid (BNA)
  modified_base 18: mod_base = OTHER; note = bicyclic nucleic acid (BNA)
  source 1..18: mol_type = other RNA
agtcggtaagttctgtcc

SEQ ID NO: 12261 - RNA, 18 nt, synthetic construct
  misc_feature 1..18: note = Description of Artificial Sequence: Synthetic Antisense oligonucleotide
  modified_base 10: mod_base = OTHER; note = bicyclic nucleic acid (BNA)
  modified_base 18: mod_base = OTHER; note = bicyclic nucleic acid (BNA)
  source 1..18: mol_type = other RNA
agtcggtaagttctgtcc

SEQ ID NO: 12262 - RNA, 18 nt, synthetic construct
  misc_feature 1..18: note = Description of Artificial Sequence: Synthetic Antisense oligonucleotide
  modified_base 5: mod_base = OTHER; note = bicyclic nucleic acid (BNA)
  modified_base 18: mod_base = OTHER; note = bicyclic nucleic acid (BNA)
  source 1..18: mol_type = other RNA
agtcggtaagttctgtcc

SEQ ID NO: 12263 - RNA, 18 nt, synthetic construct
  misc_feature 1..18: note = Description of Artificial Sequence: Synthetic Antisense oligonucleotide
  modified_base 6: mod_base = OTHER; note = bicyclic nucleic acid (BNA)
  modified_base 18: mod_base = OTHER; note = bicyclic nucleic acid (BNA)
  source 1..18: mol_type = other RNA
agtcggtaagttctgtcc

SEQ ID NO: 12264 - RNA, 18 nt, synthetic construct
  misc_feature 1..18: note = Description of Artificial Sequence: Synthetic Antisense oligonucleotide
  modified_base 13: mod_base = OTHER; note = bicyclic nucleic acid (BNA)
  modified_base 18: mod_base = OTHER; note = bicyclic nucleic acid (BNA)
  source 1..18: mol_type = other RNA
agtcggtaagttctgtcc

SEQ ID NO: 12265 - RNA, 18 nt, synthetic construct
  misc_feature 1..18: note = Description of Artificial Sequence: Synthetic Antisense oligonucleotide
  modified_base 15: mod_base = OTHER; note = bicyclic nucleic acid (BNA)
  modified_base 18: mod_base = OTHER; note = bicyclic nucleic acid (BNA)
  source 1..18: mol_type = other RNA
agtcggtaagttctgtcc

SEQ ID NO: 12266 - RNA, 18 nt, synthetic construct
  misc_feature 1..18: note = Description of Artificial Sequence: Synthetic Antisense oligonucleotide
  modified_base 3: mod_base = OTHER; note = bicyclic nucleic acid (BNA)
  modified_base 18: mod_base = OTHER; note = bicyclic nucleic acid (BNA)
  source 1..18: mol_type = other RNA
ctgtccaagcccggttga

SEQ ID NO: 12267 - RNA, 18 nt, synthetic construct
  misc_feature 1..18: note = Description of Artificial Sequence: Synthetic Antisense oligonucleotide
  modified_base 9: mod_base = OTHER; note = bicyclic nucleic acid (BNA)
  modified_base 18: mod_base = OTHER; note = bicyclic nucleic acid (BNA)
  source 1..18: mol_type = other RNA
ctgtccaagcccggttga

SEQ ID NO: 12268 - RNA, 18 nt, synthetic construct
  misc_feature 1..18: note = Description of Artificial Sequence: Synthetic Antisense oligonucleotide
  modified_base 10: mod_base = OTHER; note = bicyclic nucleic acid (BNA)
  modified_base 18: mod_base = OTHER; note = bicyclic nucleic acid (BNA)
  source 1..18: mol_type = other RNA
ctgtccaagcccggttga

SEQ ID NO: 12269 - RNA, 18 nt, synthetic construct
  misc_feature 1..18: note = Description of Artificial Sequence: Synthetic Antisense oligonucleotide
  modified_base 5: mod_base = OTHER; note = bicyclic nucleic acid (BNA)
  modified_base 18: mod_base = OTHER; note = bicyclic nucleic acid (BNA)
  source 1..18: mol_type = other RNA
ctgtccaagcccggttga

SEQ ID NO: 12270 - RNA, 18 nt, synthetic construct
  misc_feature 1..18: note = Description of Artificial Sequence: Synthetic Antisense oligonucleotide
  modified_base 11: mod_base = OTHER; note = bicyclic nucleic acid (BNA)
  modified_base 18: mod_base = OTHER; note = bicyclic nucleic acid (BNA)
  source 1..18: mol_type = other RNA
ctgtccaagcccggttga

SEQ ID NO: 12271 - RNA, 18 nt, synthetic construct
  misc_feature 1..18: note = Description of Artificial Sequence: Synthetic Antisense oligonucleotide
  modified_base 6: mod_base = OTHER; note = bicyclic nucleic acid (BNA)
  modified_base 18: mod_base = OTHER; note = bicyclic nucleic acid (BNA)
  source 1..18: mol_type = other RNA
ctgtccaagcccggttga

SEQ ID NO: 12272 - RNA, 18 nt, synthetic construct
  misc_feature 1..18: note = Description of Artificial Sequence: Synthetic Antisense oligonucleotide
  modified_base 12: mod_base = OTHER; note = bicyclic nucleic acid (BNA)
  modified_base 18: mod_base = OTHER; note = bicyclic nucleic acid (BNA)
  source 1..18: mol_type = other RNA
ctgtccaagcccggttga

SEQ ID NO: 12273 - RNA, 18 nt, synthetic construct
  misc_feature 1..18: note = Description of Artificial Sequence: Synthetic Antisense oligonucleotide
  modified_base 13: mod_base = OTHER; note = bicyclic nucleic acid (BNA)
  modified_base 18: mod_base = OTHER; note = bicyclic nucleic acid (BNA)
  source 1..18: mol_type = other RNA
ctgtccaagcccggttga

SEQ ID NO: 12274 - RNA, 18 nt, synthetic construct
  misc_feature 1..18: note = Description of Artificial Sequence: Synthetic Antisense oligonucleotide
  modified_base 14: mod_base = OTHER; note = bicyclic nucleic acid (BNA)
  modified_base 18: mod_base = OTHER; note = bicyclic nucleic acid (BNA)
  source 1..18: mol_type = other RNA
ctgtccaagcccggttga

SEQ ID NO: 12275 - RNA, 18 nt, synthetic construct
  misc_feature 1..18: note = Description of Artificial Sequence: Synthetic Antisense oligonucleotide
  modified_base 6: mod_base = OTHER; note = bicyclic nucleic acid (BNA)
  modified_base 11: mod_base = OTHER; note = bicyclic nucleic acid (BNA)
  modified_base 18: mod_base = OTHER; note = bicyclic nucleic acid (BNA)
  source 1..18: mol_type = other RNA
ggtaagttctgtccaagc

SEQ ID NO: 12276 - RNA, 18 nt, synthetic construct
  misc_feature 1..18: note = Description of Artificial Sequence: Synthetic Antisense oligonucleotide
  modified_base 9: mod_base = OTHER; note = bicyclic nucleic acid (BNA)
  modified_base 14: mod_base = OTHER; note = bicyclic nucleic acid (BNA)
  modified_base 18: mod_base = OTHER; note = bicyclic nucleic acid (BNA)
  source 1..18: mol_type = other RNA
ggtaagttctgtccaagc

SEQ ID NO: 12277 - RNA, 18 nt, synthetic construct
  misc_feature 1..18: note = Description of Artificial Sequence: Synthetic Antisense oligonucleotide
  modified_base 2: mod_base = OTHER; note = bicyclic nucleic acid (BNA)
  modified_base 13: mod_base = OTHER; note = bicyclic nucleic acid (BNA)
  modified_base 18: mod_base = OTHER; note = bicyclic nucleic acid (BNA)
  source 1..18: mol_type = other RNA
ggtaagttctgtccaagc

SEQ ID NO: 12278 - RNA, 18 nt, synthetic construct
  misc_feature 1..18: note = Description of Artificial Sequence: Synthetic Antisense oligonucleotide
  modified_base 9: mod_base = OTHER; note = bicyclic nucleic acid (BNA)
  modified_base 13: mod_base = OTHER; note = bicyclic nucleic acid (BNA)
  modified_base 18: mod_base = OTHER; note = bicyclic nucleic acid (BNA)
  source 1..18: mol_type = other RNA
ggtaagttctgtccaagc

SEQ ID NO: 12279 - RNA, 18 nt, synthetic construct
  misc_feature 1..18: note = Description of Artificial Sequence: Synthetic Antisense oligonucleotide
  modified_base 13..14: mod_base = OTHER; note = bicyclic nucleic acid (BNA)
  modified_base 18: mod_base = OTHER; note = bicyclic nucleic acid (BNA)
  source 1..18: mol_type = other RNA
ggtaagttctgtccaagc

SEQ ID NO: 12280 - RNA, 18 nt, synthetic construct
  misc_feature 1..18: note = Description of Artificial Sequence: Synthetic Antisense oligonucleotide
  modified_base 2: mod_base = OTHER; note = bicyclic nucleic acid (BNA)
  modified_base 14: mod_base = OTHER; note = bicyclic nucleic acid (BNA)
  modified_base 18: mod_base = OTHER; note = bicyclic nucleic acid (BNA)
  source 1..18: mol_type = other RNA
ggtaagttctgtccaagc

SEQ ID NO: 12281 - RNA, 18 nt, synthetic construct
  misc_feature 1..18: note = Description of Artificial Sequence: Synthetic Antisense oligonucleotide
  modified_base 11: mod_base = OTHER; note = bicyclic nucleic acid (BNA)
  modified_base 14: mod_base = OTHER; note = bicyclic nucleic acid (BNA)
  modified_base 18: mod_base = OTHER; note = bicyclic nucleic acid (BNA)
  source 1..18: mol_type = other RNA
ggtaagttctgtccaagc

SEQ ID NO: 12282 - RNA, 18 nt, synthetic construct
  misc_feature 1..18: note = Description of Artificial Sequence: Synthetic Antisense oligonucleotide
  modified_base 6: mod_base = OTHER; note = bicyclic nucleic acid (BNA)
  modified_base 13: mod_base = OTHER; note = bicyclic nucleic acid (BNA)
  modified_base 18: mod_base = OTHER; note = bicyclic nucleic acid (BNA)
  source 1..18: mol_type = other RNA
ggtaagttctgtccaagc

SEQ ID NO: 12283 - RNA, 18 nt, synthetic construct
  misc_feature 1..18: note = Description of Artificial Sequence: Synthetic Antisense oligonucleotide
  modified_base 6: mod_base = OTHER; note = bicyclic nucleic acid (BNA)
  modified_base 14: mod_base = OTHER; note = bicyclic nucleic acid (BNA)
  modified_base 18: mod_base = OTHER; note = bicyclic nucleic acid (BNA)
  source 1..18: mol_type = other RNA
ggtaagttctgtccaagc

SEQ ID NO: 12284 - RNA, 18 nt, synthetic construct
  misc_feature 1..18: note = Description of Artificial Sequence: Synthetic Antisense oligonucleotide
  modified_base 9: mod_base = OTHER; note = bicyclic nucleic acid (BNA)
  modified_base 11: mod_base = OTHER; note = bicyclic nucleic acid (BNA)
  modified_base 18: mod_base = OTHER; note = bicyclic nucleic acid (BNA)
  source 1..18: mol_type = other RNA
ggtaagttctgtccaagc

SEQ ID NO: 12285 - RNA, 18 nt, synthetic construct
  misc_feature 1..18: note = Description of Artificial Sequence: Synthetic Antisense oligonucleotide
  modified_base 11: mod_base = OTHER; note = bicyclic nucleic acid (BNA)
  modified_base 13: mod_base = OTHER; note = bicyclic nucleic acid (BNA)
  modified_base 18: mod_base = OTHER; note = bicyclic nucleic acid (BNA)
  source 1..18: mol_type = other RNA
ggtaagttctgtccaagc

SEQ ID NO: 12286 - RNA, 18 nt, synthetic construct
  misc_feature 1..18: note = Description of Artificial Sequence: Synthetic Antisense oligonucleotide
  modified_base 2: mod_base = OTHER; note = bicyclic nucleic acid (BNA)
  modified_base 6: mod_base = OTHER; note = bicyclic nucleic acid (BNA)
  modified_base 18: mod_base = OTHER; note = bicyclic nucleic acid (BNA)
  source 1..18: mol_type = other RNA
ggtaagttctgtccaagc

SEQ ID NO: 12287 - RNA, 18 nt, synthetic construct
  misc_feature 1..18: note = Description of Artificial Sequence: Synthetic Antisense oligonucleotide
  modified_base 2: mod_base = OTHER; note = bicyclic nucleic acid (BNA)
  modified_base 9: mod_base = OTHER; note = bicyclic nucleic acid (BNA)
  modified_base 18: mod_base = OTHER; note = bicyclic nucleic acid (BNA)
  source 1..18: mol_type = other RNA
ggtaagttctgtccaagc

SEQ ID NO: 12288 - RNA, 18 nt, synthetic construct
  misc_feature 1..18: note = Description of Artificial Sequence: Synthetic Antisense oligonucleotide
  modified_base 2: mod_base = OTHER; note = bicyclic nucleic acid (BNA)
  modified_base 11: mod_base = OTHER; note = bicyclic nucleic acid (BNA)
  modified_base 18: mod_base = OTHER; note = bicyclic nucleic acid (BNA)
  source 1..18: mol_type = other RNA
ggtaagttctgtccaagc

SEQ ID NO: 12289 - RNA, 18 nt, synthetic construct
  misc_feature 1..18: note = Description of Artificial Sequence: Synthetic Antisense oligonucleotide
  modified_base 6: mod_base = OTHER; note = bicyclic nucleic acid (BNA)
  modified_base 9: mod_base = OTHER; note = bicyclic nucleic acid (BNA)
  modified_base 18: mod_base = OTHER; note = bicyclic nucleic acid (BNA)
  source 1..18: mol_type = other RNA
ggtaagttctgtccaagc

SEQ ID NO: 12290 - RNA, 18 nt, synthetic construct
  misc_feature 1..18: note = Description of Artificial Sequence: Synthetic Antisense oligonucleotide
  modified_base 5: mod_base = OTHER; note = bicyclic nucleic acid (BNA)
  modified_base 8: mod_base = OTHER; note = bicyclic nucleic acid (BNA)
  modified_base 18: mod_base = OTHER; note = bicyclic nucleic acid (BNA)
  source 1..18: mol_type = other RNA
gtaagttctgtccaagcc

SEQ ID NO: 12291 - RNA, 18 nt, synthetic construct
  misc_feature 1..18: note = Description of Artificial Sequence: Synthetic Antisense oligonucleotide
  modified_base 13: mod_base = OTHER; note = bicyclic nucleic acid (BNA)
  modified_base 16: mod_base = OTHER; note = bicyclic nucleic acid (BNA)
  modified_base 18: mod_base = OTHER; note = bicyclic nucleic acid (BNA)
  source 1..18: mol_type = other RNA
gtaagttctgtccaagcc

SEQ ID NO: 12292 - RNA, 18 nt, synthetic construct
  misc_feature 1..18: note = Description of Artificial Sequence: Synthetic Antisense oligonucleotide
  modified_base 5: mod_base = OTHER; note = bicyclic nucleic acid (BNA)
  modified_base 10: mod_base = OTHER; note = bicyclic nucleic acid (BNA)
  modified_base 18: mod_base = OTHER; note = bicyclic nucleic acid (BNA)
  source 1..18: mol_type = other RNA
gtaagttctgtccaagcc

SEQ ID NO: 12293 - RNA, 18 nt, synthetic construct
  misc_feature 1..18: note = Description of Artificial Sequence: Synthetic Antisense oligonucleotide
  modified_base 8: mod_base = OTHER; note = bicyclic nucleic acid (BNA)
  modified_base 16: mod_base = OTHER; note = bicyclic nucleic acid (BNA)
  modified_base 18: mod_base = OTHER; note = bicyclic nucleic acid (BNA)
  source 1..18: mol_type = other RNA
gtaagttctgtccaagcc

SEQ ID NO: 12294 - RNA, 18 nt, synthetic construct
  misc_feature 1..18: note = Description of Artificial Sequence: Synthetic Antisense oligonucleotide
  modified_base 10: mod_base = OTHER; note = bicyclic nucleic acid (BNA)
  modified_base 16: mod_base = OTHER; note = bicyclic nucleic acid (BNA)
  modified_base 18: mod_base = OTHER; note = bicyclic nucleic acid (BNA)
  source 1..18: mol_type = other RNA
gtaagttctgtccaagcc

SEQ ID NO: 12295 - RNA, 18 nt, synthetic construct
  misc_feature 1..18: note = Description of Artificial Sequence: Synthetic Antisense oligonucleotide
  modified_base 8: mod_base = OTHER; note = bicyclic nucleic acid (BNA)
  modified_base 13: mod_base = OTHER; note = bicyclic nucleic acid (BNA)
  modified_base 18: mod_base = OTHER; note = bicyclic nucleic acid (BNA)
  source 1..18: mol_type = other RNA
gtaagttctgtccaagcc

SEQ ID NO: 12296 - RNA, 18 nt, synthetic construct
  misc_feature 1..18: note = Description of Artificial Sequence: Synthetic Antisense oligonucleotide
  modified_base 5: mod_base = OTHER; note = bicyclic nucleic acid (BNA)
  modified_base 16: mod_base = OTHER; note = bicyclic nucleic acid (BNA)
  modified_base 18: mod_base = OTHER; note = bicyclic nucleic acid (BNA)
  source 1..18: mol_type = other RNA
gtaagttctgtccaagcc

SEQ ID NO: 12297 - RNA, 18 nt, synthetic construct
  misc_feature 1..18: note = Description of Artificial Sequence: Synthetic Antisense oligonucleotide
  modified_base 10: mod_base = OTHER; note = bicyclic nucleic acid (BNA)
  modified_base 13: mod_base = OTHER; note = bicyclic nucleic acid (BNA)
  modified_base 18: mod_base = OTHER; note = bicyclic nucleic acid (BNA)
  source 1..18: mol_type = other RNA
gtaagttctgtccaagcc

SEQ ID NO: 12298 - RNA, 18 nt, synthetic construct
  misc_feature 1..18: note = Description of Artificial Sequence: Synthetic Antisense oligonucleotide
  modified_base 5: mod_base = OTHER; note = bicyclic nucleic acid (BNA)
  modified_base 13: mod_base = OTHER; note = bicyclic nucleic acid (BNA)
  modified_base 18: mod_base = OTHER; note = bicyclic nucleic acid (BNA)
  source 1..18: mol_type = other RNA
gtaagttctgtccaagcc

SEQ ID NO: 12299 - RNA, 18 nt, synthetic construct
  misc_feature 1..18: note = Description of Artificial Sequence: Synthetic Antisense oligonucleotide
  modified_base 10: mod_base = OTHER; note = bicyclic nucleic acid (BNA)
  modified_base 12: mod_base = OTHER; note = bicyclic nucleic acid (BNA)
  modified_base 18: mod_base = OTHER; note = bicyclic nucleic acid (BNA)
  source 1..18: mol_type = other RNA
gtaagttctgtccaagcc

SEQ ID NO: 12300 - RNA, 18 nt, synthetic construct
  misc_feature 1..18: note = Description of Artificial Sequence: Synthetic Antisense oligonucleotide
  modified_base 8: mod_base = OTHER; note = bicyclic nucleic acid (BNA)
  modified_base 12: mod_base = OTHER; note = bicyclic nucleic acid (BNA)
  modified_base 18: mod_base = OTHER; note = bicyclic nucleic acid (BNA)
  source 1..18: mol_type = other RNA
gtaagttctgtccaagcc

SEQ ID NO: 12301 - RNA, 18 nt, synthetic construct
  misc_feature 1..18: note = Description of Artificial Sequence: Synthetic Antisense oligonucleotide
  modified_base 12: mod_base = OTHER; note = bicyclic nucleic acid (BNA)
  modified_base 16: mod_base = OTHER; note = bicyclic nucleic acid (BNA)
  modified_base 18: mod_base = OTHER; note = bicyclic nucleic acid (BNA)
  source 1..18: mol_type = other RNA
gtaagttctgtccaagcc

SEQ ID NO: 12302 - RNA, 18 nt, synthetic construct
  misc_feature 1..18: note = Description of Artificial Sequence: Synthetic Antisense oligonucleotide
  modified_base 12..13: mod_base = OTHER; note = bicyclic nucleic acid (BNA)
  modified_base 18: mod_base = OTHER; note = bicyclic nucleic acid (BNA)
  source 1..18: mol_type = other RNA
gtaagttctgtccaagcc

SEQ ID NO: 12303 - RNA, 18 nt, synthetic construct
  misc_feature 1..18: note = Description of Artificial Sequence: Synthetic Antisense oligonucleotide
  modified_base 5: mod_base = OTHER; note = bicyclic nucleic acid (BNA)
  modified_base 12: mod_base = OTHER; note = bicyclic nucleic acid (BNA)
  modified_base 18: mod_base = OTHER; note = bicyclic nucleic acid (BNA)
  source 1..18: mol_type = other RNA
gtaagttctgtccaagcc

SEQ ID NO: 12304 - RNA, 18 nt, synthetic construct
  misc_feature 1..18: note = Description of Artificial Sequence: Synthetic Antisense oligonucleotide
  modified_base 8: mod_base = OTHER; note = bicyclic nucleic acid (BNA)
  modified_base 10: mod_base = OTHER; note = bicyclic nucleic acid (BNA)
  modified_base 18: mod_base = OTHER; note = bicyclic nucleic acid (BNA)
  source 1..18: mol_type = other RNA
gtaagttctgtccaagcc

SEQ ID NO: 12305 - RNA, 18 nt, synthetic construct
  misc_feature 1..18: note = Description of Artificial Sequence: Synthetic Antisense oligonucleotide
  modified_base 6: mod_base = OTHER; note = bicyclic nucleic acid (BNA)
  modified_base 10: mod_base = OTHER; note = bicyclic nucleic acid (BNA)
  modified_base 18: mod_base = OTHER; note = bicyclic nucleic acid (BNA)
  source 1..18: mol_type = other RNA
agtcggtaagttctgtcc

SEQ ID NO: 12306 - RNA, 18 nt, synthetic construct
  misc_feature 1..18: note = Description of Artificial Sequence: Synthetic Antisense oligonucleotide
  modified_base 2: mod_base = OTHER; note = bicyclic nucleic acid (BNA)
  modified_base 4: mod_base = OTHER; note = bicyclic nucleic acid (BNA)
  modified_base 18: mod_base = OTHER; note = bicyclic nucleic acid (BNA)
  source 1..18: mol_type = other RNA
agtcggtaagttctgtcc

SEQ ID NO: 12307 - RNA, 18 nt, synthetic construct
  misc_feature 1..18: note = Description of Artificial Sequence: Synthetic Antisense oligonucleotide
  modified_base 5: mod_base = OTHER; note = bicyclic nucleic acid (BNA)
  modified_base 13: mod_base = OTHER; note = bicyclic nucleic acid (BNA)
  modified_base 18: mod_base = OTHER; note = bicyclic nucleic acid (BNA)
  source 1..18: mol_type = other RNA
agtcggtaagttctgtcc

SEQ ID NO: 12308 - RNA, 18 nt, synthetic construct
  misc_feature 1..18: note = Description of Artificial Sequence: Synthetic Antisense oligonucleotide
  modified_base 4: mod_base = OTHER; note = bicyclic nucleic acid (BNA)
  modified_base 15: mod_base = OTHER; note = bicyclic nucleic acid (BNA)
  modified_base 18: mod_base = OTHER; note = bicyclic nucleic acid (BNA)
  source 1..18: mol_type = other RNA
agtcggtaagttctgtcc

SEQ ID NO: 12309 - RNA, 18 nt, synthetic construct
  misc_feature 1..18: note = Description of Artificial Sequence: Synthetic Antisense oligonucleotide
  modified_base 5: mod_base = OTHER; note = bicyclic nucleic acid (BNA)
  modified_base 10: mod_base = OTHER; note = bicyclic nucleic acid (BNA)
  modified_base 18: mod_base = OTHER; note = bicyclic nucleic acid (BNA)
  source 1..18: mol_type = other RNA
agtcggtaagttctgtcc

SEQ ID NO: 12310 - RNA, 18 nt, synthetic construct
  misc_feature 1..18: note = Description of Artificial Sequence: Synthetic Antisense oligonucleotide
  modified_base 6: mod_base = OTHER; note = bicyclic nucleic acid (BNA)
  modified_base 13: mod_base = OTHER; note = bicyclic nucleic acid (BNA)
  modified_base 18: mod_base = OTHER; note = bicyclic nucleic acid (BNA)
  source 1..18: mol_type = other RNA
agtcggtaagttctgtcc

SEQ ID NO: 12311 - RNA, 18 nt, synthetic construct
  misc_feature 1..18: note = Description of Artificial Sequence: Synthetic Antisense oligonucleotide
  modified_base 2: mod_base = OTHER; note = bicyclic nucleic acid (BNA)
  modified_base 15: mod_base = OTHER; note = bicyclic nucleic acid (BNA)
  modified_base 18: mod_base = OTHER; note = bicyclic nucleic acid (BNA)
  source 1..18: mol_type = other RNA
agtcggtaagttctgtcc

SEQ ID NO: 12312 - RNA, 18 nt, synthetic construct
  misc_feature 1..18: note = Description of Artificial Sequence: Synthetic Antisense oligonucleotide
  modified_base 2: mod_base = OTHER; note = bicyclic nucleic acid (BNA)
  modified_base 6: mod_base = OTHER; note = bicyclic nucleic acid (BNA)
  modified_base 18: mod_base = OTHER; note = bicyclic nucleic acid (BNA)
  source 1..18: mol_type = other RNA
agtcggtaagttctgtcc

SEQ ID NO: 12313 - RNA, 18 nt, synthetic construct
  misc_feature 1..18: note = Description of Artificial Sequence: Synthetic Antisense oligonucleotide
  modified_base 10: mod_base = OTHER; note = bicyclic nucleic acid (BNA)
  modified_base 15: mod_base = OTHER; note = bicyclic nucleic acid (BNA)
  modified_base 18: mod_base = OTHER; note = bicyclic nucleic acid (BNA)
  source 1..18: mol_type = other RNA
agtcggtaagttctgtcc

SEQ ID NO: 12314 - RNA, 18 nt, synthetic construct
  misc_feature 1..18: note = Description of Artificial Sequence: Synthetic Antisense oligonucleotide
  modified_base 13: mod_base = OTHER; note = bicyclic nucleic acid (BNA)
  modified_base 15: mod_base = OTHER; note = bicyclic nucleic acid (BNA)
  modified_base 18: mod_base = OTHER; note = bicyclic nucleic acid (BNA)
  source 1..18: mol_type = other RNA
agtcggtaagttctgtcc

SEQ ID NO: 12315 - RNA, 18 nt, synthetic construct
  misc_feature 1..18: note = Description of Artificial Sequence: Synthetic Antisense oligonucleotide
  modified_base 5..6: mod_base = OTHER; note = bicyclic nucleic acid (BNA)
  modified_base 18: mod_base = OTHER; note = bicyclic nucleic acid (BNA)
  source 1..18: mol_type = other RNA
agtcggtaagttctgtcc

SEQ ID NO: 12316 - RNA, 18 nt, synthetic construct
  misc_feature 1..18: note = Description of Artificial Sequence: Synthetic Antisense oligonucleotide
  modified_base 5: mod_base = OTHER; note = bicyclic nucleic acid (BNA)
  modified_base 15: mod_base = OTHER; note = bicyclic nucleic acid (BNA)
  modified_base 18: mod_base = OTHER; note = bicyclic nucleic acid (BNA)
  source 1..18: mol_type = other RNA
agtcggtaagttctgtcc

SEQ ID NO: 12317 - RNA, 18 nt, synthetic construct
  misc_feature 1..18: note = Description of Artificial Sequence: Synthetic Antisense oligonucleotide
  modified_base 2: mod_base = OTHER; note = bicyclic nucleic acid (BNA)
  modified_base 5: mod_base = OTHER; note = bicyclic nucleic acid (BNA)
  modified_base 18: mod_base = OTHER; note = bicyclic nucleic acid (BNA)
  source 1..18: mol_type = other RNA
agtcggtaagttctgtcc

SEQ ID NO: 12318 - RNA, 18 nt, synthetic construct
  misc_feature 1..18: note = Description of Artificial Sequence: Synthetic Antisense oligonucleotide
  modified_base 4: mod_base = OTHER; note = bicyclic nucleic acid (BNA)
  modified_base 10: mod_base = OTHER; note = bicyclic nucleic acid (BNA)
  modified_base 18: mod_base = OTHER; note = bicyclic nucleic acid (BNA)
  source 1..18: mol_type = other RNA
agtcggtaagttctgtcc

SEQ ID NO: 12319 - RNA, 18 nt, synthetic construct
  misc_feature 1..18: note = Description of Artificial Sequence: Synthetic Antisense oligonucleotide
  modified_base 2: mod_base = OTHER; note = bicyclic nucleic acid (BNA)
  modified_base 10: mod_base = OTHER; note = bicyclic nucleic acid (BNA)
  modified_base 18: mod_base = OTHER; note = bicyclic nucleic acid (BNA)
  source 1..18: mol_type = other RNA
agtcggtaagttctgtcc

SEQ ID NO: 12320 - RNA, 18 nt, synthetic construct
  misc_feature 1..18: note = Description of Artificial Sequence: Synthetic Antisense oligonucleotide
  modified_base 4: mod_base = OTHER; note = bicyclic nucleic acid (BNA)
  modified_base 6: mod_base = OTHER; note = bicyclic nucleic acid (BNA)
  modified_base 18: mod_base = OTHER; note = bicyclic nucleic acid (BNA)
  source 1..18: mol_type = other RNA
agtcggtaagttctgtcc

SEQ ID NO: 12321 - RNA, 18 nt, synthetic construct
  misc_feature 1..18: note = Description of Artificial Sequence: Synthetic Antisense oligonucleotide
  modified_base 4: mod_base = OTHER; note = bicyclic nucleic acid (BNA)
  modified_base 13: mod_base = OTHER; note = bicyclic nucleic acid (BNA)
  modified_base 18: mod_base = OTHER; note = bicyclic nucleic acid (BNA)
  source 1..18: mol_type = other RNA
agtcggtaagttctgtcc

SEQ ID NO: 12322 - RNA, 18 nt, synthetic construct
  misc_feature 1..18: note = Description of Artificial Sequence: Synthetic Antisense oligonucleotide
  modified_base 2: mod_base = OTHER; note = bicyclic nucleic acid (BNA)
  modified_base 13: mod_base = OTHER; note = bicyclic nucleic acid (BNA)
  modified_base 18: mod_base = OTHER; note = bicyclic nucleic acid (BNA)
  source 1..18: mol_type = other RNA
agtcggtaagttctgtcc

SEQ ID NO: 12323 - RNA, 18 nt, synthetic construct
  misc_feature 1..18: note = Description of Artificial Sequence: Synthetic Antisense oligonucleotide
  modified_base 6: mod_base = OTHER; note = bicyclic nucleic acid (BNA)
  modified_base 15: mod_base = OTHER; note = bicyclic nucleic acid (BNA)
  modified_base 18: mod_base = OTHER; note = bicyclic nucleic acid (BNA)
  source 1..18: mol_type = other RNA
agtcggtaagttctgtcc

SEQ ID NO: 12324 - RNA, 18 nt, synthetic construct
  misc_feature 1..18: note = Description of Artificial Sequence: Synthetic Antisense oligonucleotide
  modified_base 4..5: mod_base = OTHER; note = bicyclic nucleic acid (BNA)
  modified_base 18: mod_base = OTHER; note = bicyclic nucleic acid (BNA)
  source 1..18: mol_type = other RNA
agtcggtaagttctgtcc

SEQ ID NO: 12325 - RNA, 18 nt, synthetic construct
  misc_feature 1..18: note = Description of Artificial Sequence: Synthetic Antisense oligonucleotide
  modified_base 10: mod_base = OTHER; note = bicyclic nucleic acid (BNA)
  modified_base 13: mod_base = OTHER; note = bicyclic nucleic acid (BNA)
  modified_base 18: mod_base = OTHER; note = bicyclic nucleic acid (BNA)
  source 1..18: mol_type = other RNA
agtcggtaagttctgtcc

SEQ ID NO: 12326 - RNA, 18 nt, synthetic construct
  misc_feature 1..18: note = Description of Artificial Sequence: Synthetic Antisense oligonucleotide
  modified_base 6: mod_base = OTHER; note = bicyclic nucleic acid (BNA)
  modified_base 10: mod_base = OTHER; note = bicyclic nucleic acid (BNA)
  modified_base 18: mod_base = OTHER; note = bicyclic nucleic acid (BNA)
  source 1..18: mol_type = other RNA
ctgtccaagcccggttga

SEQ ID NO: 12327 - RNA, 18 nt, synthetic construct
  misc_feature 1..18: note = Description of Artificial Sequence: Synthetic Antisense oligonucleotide
  modified_base 9: mod_base = OTHER; note = bicyclic nucleic acid (BNA)
  modified_base 14: mod_base = OTHER; note = bicyclic nucleic acid (BNA)
  modified_base 18: mod_base = OTHER; note = bicyclic nucleic acid (BNA)
  source 1..18: mol_type = other RNA
ctgtccaagcccggttga

SEQ ID NO: 12328 - RNA, 18 nt, synthetic construct
  misc_feature 1..18: note = Description of Artificial Sequence: Synthetic Antisense oligonucleotide
  modified_base 11..12: mod_base = OTHER; note = bicyclic nucleic acid (BNA)
  modified_base 18: mod_base = OTHER; note = bicyclic nucleic acid (BNA)
  source 1..18: mol_type = other RNA
ctgtccaagcccggttga

SEQ ID NO: 12329 - RNA, 18 nt, synthetic construct
  misc_feature 1..18: note = Description of Artificial Sequence: Synthetic Antisense oligonucleotide
  modified_base 5: mod_base = OTHER; note = bicyclic nucleic acid (BNA)
  modified_base 9: mod_base = OTHER; note = bicyclic nucleic acid (BNA)
  modified_base 18: mod_base = OTHER; note = bicyclic nucleic acid (BNA)
  source 1..18: mol_type = other RNA
ctgtccaagcccggttga

SEQ ID NO: 12330 - RNA, 18 nt, synthetic construct
  misc_feature 1..18: note = Description of Artificial Sequence: Synthetic Antisense oligonucleotide
  modified_base 3: mod_base = OTHER; note = bicyclic nucleic acid (BNA)
  modified_base 9: mod_base = OTHER; note = bicyclic nucleic acid (BNA)
  modified_base 18: mod_base = OTHER; note = bicyclic nucleic acid (BNA)
  source 1..18: mol_type = other RNA
ctgtccaagcccggttga

SEQ ID NO: 12331 - RNA, 18 nt, synthetic construct
  misc_feature 1..18: note = Description of Artificial Sequence: Synthetic Antisense oligonucleotide
  modified_base 6: mod_base = OTHER; note = bicyclic nucleic acid (BNA)
  modified_base 14: mod_base = OTHER; note = bicyclic nucleic acid (BNA)
  modified_base 18: mod_base = OTHER; note = bicyclic nucleic acid (BNA)
  source 1..18: mol_type = other RNA
ctgtccaagcccggttga

SEQ ID NO: 12332 - RNA, 18 nt, synthetic construct
  misc_feature 1..18: note = Description of Artificial Sequence: Synthetic Antisense oligonucleotide
  modified_base 9..10: mod_base = OTHER; note = bicyclic nucleic acid (BNA)
  modified_base 18: mod_base = OTHER; note = bicyclic nucleic acid (BNA)
  source 1..18: mol_type = other RNA
ctgtccaagcccggttga

SEQ ID NO: 12333 - RNA, 18 nt, synthetic construct
  misc_feature 1..18: note = Description of Artificial Sequence: Synthetic Antisense oligonucleotide
  modified_base 5: mod_base = OTHER; note = bicyclic nucleic acid (BNA)
  modified_base 13: mod_base = OTHER; note = bicyclic nucleic acid (BNA)
  modified_base 18: mod_base = OTHER; note = bicyclic nucleic acid (BNA)
  source 1..18: mol_type = other RNA
ctgtccaagcccggttga

SEQ ID NO: 12334 - RNA, 18 nt, synthetic construct
  misc_feature 1..18: note = Description of Artificial Sequence: Synthetic Antisense oligonucleotide
  modified_base 3: mod_base = OTHER; note = bicyclic nucleic acid (BNA)
  modified_base 13: mod_base = OTHER; note = bicyclic nucleic acid (BNA)
  modified_base 18: mod_base = OTHER; note = bicyclic nucleic acid (BNA)
  source 1..18: mol_type = other RNA
ctgtccaagcccggttga

SEQ ID NO: 12335 - RNA, 18 nt, synthetic construct
  misc_feature 1..18: note = Description of Artificial Sequence: Synthetic Antisense oligonucleotide
  modified_base 3: mod_base = OTHER; note = bicyclic nucleic acid (BNA)
  modified_base 6: mod_base = OTHER; note = bicyclic nucleic acid (BNA)
  modified_base 18: mod_base = OTHER; note = bicyclic nucleic acid (BNA)
  source 1..18: mol_type = other RNA
ctgtccaagcccggttga

SEQ ID NO: 12336 - RNA, 18 nt, synthetic construct
  misc_feature 1..18: note = Description of Artificial Sequence: Synthetic Antisense oligonucleotide
  modified_base 6: mod_base = OTHER; note = bicyclic nucleic acid (BNA)
  modified_base 9: mod_base = OTHER; note = bicyclic nucleic acid (BNA)
  modified_base 18: mod_base = OTHER; note = bicyclic nucleic acid (BNA)
  source 1..18: mol_type = other RNA
ctgtccaagcccggttga

SEQ ID NO: 12337 - RNA, 18 nt, synthetic construct
  misc_feature 1..18: note = Description of Artificial Sequence: Synthetic Antisense oligonucleotide
  modified_base 5: mod_base = OTHER; note = bicyclic nucleic acid (BNA)
  modified_base 10: mod_base = OTHER; note = bicyclic nucleic acid (BNA)
  modified_base 18: mod_base = OTHER; note = bicyclic nucleic acid (BNA)
  source 1..18: mol_type = other RNA
ctgtccaagcccggttga

SEQ ID NO: 12338 - RNA, 18 nt, synthetic construct
  misc_feature 1..18: note = Description of Artificial Sequence: Synthetic Antisense oligonucleotide
  modified_base 3: mod_base = OTHER; note = bicyclic nucleic acid (BNA)
  modified_base 10: mod_base = OTHER; note = bicyclic nucleic acid (BNA)
  modified_base 18: mod_base = OTHER; note = bicyclic nucleic acid (BNA)
  source 1..18: mol_type = other RNA
ctgtccaagcccggttga

SEQ ID NO: 12339 - RNA, 18 nt, synthetic construct
  misc_feature 1..18: note = Description of Artificial Sequence: Synthetic Antisense oligonucleotide
  modified_base 13..14: mod_base = OTHER; note = bicyclic nucleic acid (BNA)
  modified_base 18: mod_base = OTHER; note = bicyclic nucleic acid (BNA)
  source 1..18: mol_type = other RNA
ctgtccaagcccggttga

SEQ ID NO: 12340 - RNA, 18 nt, synthetic construct
  misc_feature 1..18: note = Description of Artificial Sequence: Synthetic Antisense oligonucleotide
  modified_base 6: mod_base = OTHER; note = bicyclic nucleic acid (BNA)
  modified_base 13: mod_base = OTHER; note = bicyclic nucleic acid (BNA)
  modified_base 18: mod_base = OTHER; note = bicyclic nucleic acid (BNA)
  source 1..18: mol_type = other RNA
ctgtccaagcccggttga

SEQ ID NO: 12341 - RNA, 18 nt, synthetic construct
  misc_feature 1..18: note = Description of Artificial Sequence: Synthetic Antisense oligonucleotide
  modified_base 9: mod_base = OTHER; note = bicyclic nucleic acid (BNA)
  modified_base 11: mod_base = OTHER; note = bicyclic nucleic acid (BNA)
  modified_base 18: mod_base = OTHER; note = bicyclic nucleic acid (BNA)
  source 1..18: mol_type = other RNA
ctgtccaagcccggttga

SEQ ID NO: 12342 - RNA, 18 nt, synthetic construct
  misc_feature 1..18: note = Description of Artificial Sequence: Synthetic Antisense oligonucleotide
  modified_base 11: mod_base = OTHER; note = bicyclic nucleic acid (BNA)
  modified_base 13: mod_base = OTHER; note = bicyclic nucleic acid (BNA)
  modified_base 18: mod_base = OTHER; note = bicyclic nucleic acid (BNA)
  source 1..18: mol_type = other RNA
ctgtccaagcccggttga

SEQ ID NO: 12343 - RNA, 18 nt, synthetic construct
  misc_feature 1..18: note = Description of Artificial Sequence: Synthetic Antisense oligonucleotide
  modified_base 5: mod_base = OTHER; note = bicyclic nucleic acid (BNA)
  modified_base 14: mod_base = OTHER; note = bicyclic nucleic acid (BNA)
  modified_base 18: mod_base = OTHER; note = bicyclic nucleic acid (BNA)
  source 1..18: mol_type = other RNA
ctgtccaagcccggttga

SEQ ID NO: 12344 - RNA, 18 nt, synthetic construct
  misc_feature 1..18: note = Description of Artificial Sequence: Synthetic Antisense oligonucleotide
  modified_base 3: mod_base = OTHER; note = bicyclic nucleic acid (BNA)
  modified_base 14: mod_base = OTHER; note = bicyclic nucleic acid (BNA)
  modified_base 18: mod_base = OTHER; note = bicyclic nucleic acid (BNA)
  source 1..18: mol_type = other RNA
ctgtccaagcccggttga

SEQ ID NO: 12345 - RNA, 18 nt, synthetic construct
  misc_feature 1..18: note = Description of Artificial Sequence: Synthetic Antisense oligonucleotide
  modified_base 10: mod_base = OTHER; note = bicyclic nucleic acid (BNA)
  modified_base 12: mod_base = OTHER; note = bicyclic nucleic acid (BNA)
  modified_base 18: mod_base = OTHER; note = bicyclic nucleic acid (BNA)
  source 1..18: mol_type = other RNA
ctgtccaagcccggttga

SEQ ID NO: 12346 - RNA, 18 nt, synthetic construct
  misc_feature 1..18: note = Description of Artificial Sequence: Synthetic Antisense oligonucleotide
  modified_base 12: mod_base = OTHER; note = bicyclic nucleic acid (BNA)
  modified_base 14: mod_base = OTHER; note = bicyclic nucleic acid (BNA)
  modified_base 18: mod_base = OTHER; note = bicyclic nucleic acid (BNA)
  source 1..18: mol_type = other RNA
ctgtccaagcccggttga

SEQ ID NO: 12347 - RNA, 18 nt, synthetic construct
  misc_feature 1..18: note = Description of Artificial Sequence: Synthetic Antisense oligonucleotide
  modified_base 5: mod_base = OTHER; note = bicyclic nucleic acid (BNA)
  modified_base 11: mod_base = OTHER; note = bicyclic nucleic acid (BNA)
  modified_base 18: mod_base = OTHER; note = bicyclic nucleic acid (BNA)
  source 1..18: mol_type = other RNA
ctgtccaagcccggttga

SEQ ID NO: 12348 - RNA, 18 nt, synthetic construct
  misc_feature 1..18: note = Description of Artificial Sequence: Synthetic Antisense oligonucleotide
  modified_base 6: mod_base = OTHER; note = bicyclic nucleic acid (BNA)
  modified_base 12: mod_base = OTHER; note = bicyclic nucleic acid (BNA)
  modified_base 18: mod_base = OTHER; note = bicyclic nucleic acid (BNA)
  source 1..18: mol_type = other RNA
ctgtccaagcccggttga

SEQ ID NO: 12349 - RNA, 18 nt, synthetic construct
  misc_feature 1..18: note = Description of Artificial Sequence: Synthetic Antisense oligonucleotide
  modified_base 5..6: mod_base = OTHER; note = bicyclic nucleic acid (BNA)
  modified_base 18: mod_base = OTHER; note = bicyclic nucleic acid (BNA)
  source 1..18: mol_type = other RNA
ctgtccaagcccggttga

SEQ ID NO: 12350 - RNA, 18 nt, synthetic construct
  misc_feature 1..18: note = Description of Artificial Sequence: Synthetic Antisense oligonucleotide
  modified_base 11: mod_base = OTHER; note = bicyclic nucleic acid (BNA)
  modified_base 14: mod_base = OTHER; note = bicyclic nucleic acid (BNA)
  modified_base 18: mod_base = OTHER; note = bicyclic nucleic acid (BNA)
  source 1..18: mol_type = other RNA
ctgtccaagcccggttga

SEQ ID NO: 12351 - RNA, 18 nt, synthetic construct
  misc_feature 1..18: note = Description of Artificial Sequence: Synthetic Antisense oligonucleotide
  modified_base 9: mod_base = OTHER; note = bicyclic nucleic acid (BNA)
  modified_base 12: mod_base = OTHER; note = bicyclic nucleic acid (BNA)
  modified_base 18: mod_base = OTHER; note = bicyclic nucleic acid (BNA)
  source 1..18: mol_type = other RNA
ctgtccaagcccggttga

SEQ ID NO: 12352 - RNA, 18 nt, synthetic construct
  misc_feature 1..18: note = Description of Artificial Sequence: Synthetic Antisense oligonucleotide
  modified_base 3: mod_base = OTHER; note = bicyclic nucleic acid (BNA)
  modified_base 11: mod_base = OTHER; note = bicyclic nucleic acid (BNA)
  modified_base 18: mod_base = OTHER; note = bicyclic nucleic acid (BNA)
  source 1..18: mol_type = other RNA
ctgtccaagcccggttga

SEQ ID NO: 12353 - RNA, 18 nt, synthetic construct
  misc_feature 1..18: note = Description of Artificial Sequence: Synthetic Antisense oligonucleotide
  modified_base 10..11: mod_base = OTHER; note = bicyclic nucleic acid (BNA)
  modified_base 18: mod_base = OTHER; note = bicyclic nucleic acid (BNA)
  source 1..18: mol_type = other RNA
ctgtccaagcccggttga

SEQ ID NO: 12354 - RNA, 18 nt, synthetic construct
  misc_feature 1..18: note = Description of Artificial Sequence: Synthetic Antisense oligonucleotide
  modified_base 12..13: mod_base = OTHER; note = bicyclic nucleic acid (BNA)
  modified_base 18: mod_base = OTHER; note = bicyclic nucleic acid (BNA)
  source 1..18: mol_type = other RNA
ctgtccaagcccggttga

SEQ ID NO: 12355 - RNA, 18 nt, synthetic construct
  misc_feature 1..18: note = Description of Artificial Sequence: Synthetic Antisense oligonucleotide
  modified_base 5: mod_base = OTHER; note = bicyclic nucleic acid (BNA)
  modified_base 12: mod_base = OTHER; note = bicyclic nucleic acid (BNA)
  modified_base 18: mod_base = OTHER; note = bicyclic nucleic acid (BNA)
  source 1..18: mol_type = other RNA
ctgtccaagcccggttga

SEQ ID NO: 12356 - RNA, 18 nt, synthetic construct
  misc_feature 1..18: note = Description of Artificial Sequence: Synthetic Antisense oligonucleotide
  modified_base 10: mod_base = OTHER; note = bicyclic nucleic acid (BNA)
  modified_base 14: mod_base = OTHER; note = bicyclic nucleic acid (BNA)
  modified_base 18: mod_base = OTHER; note = bicyclic nucleic acid (BNA)
  source 1..18: mol_type = other RNA
ctgtccaagcccggttga

SEQ ID NO: 12357 - RNA, 18 nt, synthetic construct
  misc_feature 1..18: note = Description of Artificial Sequence: Synthetic Antisense oligonucleotide
  modified_base 6: mod_base = OTHER; note = bicyclic nucleic acid (BNA)
  modified_base 11: mod_base = OTHER; note = bicyclic nucleic acid (BNA)
  modified_base 18: mod_base = OTHER; note = bicyclic nucleic acid (BNA)
  source 1..18: mol_type = other RNA
ctgtccaagcccggttga

SEQ ID NO: 12358 - RNA, 18 nt, synthetic construct
  misc_feature 1..18: note = Description of Artificial Sequence: Synthetic Antisense oligonucleotide
  modified_base 9: mod_base = OTHER; note = bicyclic nucleic acid (BNA)
  modified_base 13: mod_base = OTHER; note = bicyclic nucleic acid (BNA)
  modified_base 18: mod_base = OTHER; note = bicyclic nucleic acid (BNA)
  source 1..18: mol_type = other RNA
ctgtccaagcccggttga

SEQ ID NO: 12359 - RNA, 18 nt, synthetic construct
  misc_feature 1..18: note = Description of Artificial Sequence: Synthetic Antisense oligonucleotide
  modified_base 3: mod_base = OTHER; note = bicyclic nucleic acid (BNA)
  modified_base 12: mod_base = OTHER; note = bicyclic nucleic acid (BNA)
  modified_base 18: mod_base = OTHER; note = bicyclic nucleic acid (BNA)
  source 1..18: mol_type = other RNA
ctgtccaagcccggttga

SEQ ID NO: 12360 - RNA, 18 nt, synthetic construct
  misc_feature 1..18: note = Description of Artificial Sequence: Synthetic Antisense oligonucleotide
  modified_base 3: mod_base = OTHER; note = bicyclic nucleic acid (BNA)
  modified_base 5: mod_base = OTHER; note = bicyclic nucleic acid (BNA)
  modified_base 18: mod_base = OTHER; note = bicyclic nucleic acid (BNA)
  source 1..18: mol_type = other RNA
ctgtccaagcccggttga

SEQ ID NO: 12361 - RNA, 18 nt, synthetic construct
  misc_feature 1..18: note = Description of Artificial Sequence: Synthetic Antisense oligonucleotide
  modified_base 10: mod_base = OTHER; note = bicyclic nucleic acid (BNA)
  modified_base 13: mod_base = OTHER; note = bicyclic nucleic acid (BNA)
  modified_base 18: mod_base = OTHER; note = bicyclic nucleic acid (BNA)
  source 1..18: mol_type = other RNA
ctgtccaagcccggttga

SEQ ID NO: 12362 - DNA, 20 bp, synthetic construct
  misc_feature 1..20: note = Description of Artificial Sequence: Synthetic Antisense oligonucleotide
  misc_feature 1..20: note = Original Sequence: ucaaggaagauggcauuuct
  modified_base 2: mod_base = OTHER; note = bicyclic nucleic acid (BNA)
  modified_base 20: mod_base = OTHER; note = bicyclic nucleic acid (BNA)
  source 1..20: mol_type = other DNA
  modified_base 1: mod_base = OTHER; note = Uracil
  modified_base 11: mod_base = OTHER; note = Uracil
  modified_base 16: mod_base = OTHER; note = Uracil
  modified_base 17: mod_base = OTHER; note = Uracil
  modified_base 18: mod_base = OTHER; note = Uracil
tcaaggaagatggcatttct

SEQ ID NO: 12363 - DNA, 20 bp, synthetic construct
  misc_feature 1..20: note = Description of Artificial Sequence: Synthetic Antisense oligonucleotide
  misc_feature 1..20: note = Original Sequence: ucaaggaagauggcauuuct
  modified_base 9: mod_base = OTHER; note = bicyclic nucleic acid (BNA)
  modified_base 20: mod_base = OTHER; note = bicyclic nucleic acid (BNA)
  source 1..20: mol_type = other DNA
  modified_base 1: mod_base = OTHER; note = Uracil
  modified_base 11: mod_base = OTHER; note = Uracil
  modified_base 16: mod_base = OTHER; note = Uracil
  modified_base 17: mod_base = OTHER; note = Uracil
  modified_base 18: mod_base = OTHER; note = Uracil
tcaaggaagatggcatttct

SEQ ID NO: 12364 - DNA, 20 bp, synthetic construct
  misc_feature 1..20: note = Description of Artificial Sequence: Synthetic Antisense oligonucleotide
  misc_feature 1..20: note = Original Sequence: ucaaggaagauggcauuuct
  modified_base 5: mod_base = OTHER; note = bicyclic nucleic acid (BNA)
  modified_base 20: mod_base = OTHER; note = bicyclic nucleic acid (BNA)
  source 1..20: mol_type = other DNA
  modified_base 1: mod_base = OTHER; note = Uracil
  modified_base 11: mod_base = OTHER; note = Uracil
  modified_base 16: mod_base = OTHER; note = Uracil
  modified_base 17: mod_base = OTHER; note = Uracil
  modified_base 18: mod_base = OTHER; note = Uracil
tcaaggaagatggcatttct

SEQ ID NO: 12365 - DNA, 20 bp, synthetic construct
  misc_feature 1..20: note = Description of Artificial Sequence: Synthetic Antisense oligonucleotide
  misc_feature 1..20: note = Original Sequence: ucaaggaagauggcauuuct
  modified_base 6: mod_base = OTHER; note = bicyclic nucleic acid (BNA)
  modified_base 20: mod_base = OTHER; note = bicyclic nucleic acid (BNA)
  source 1..20: mol_type = other DNA
  modified_base 1: mod_base = OTHER; note = Uracil
  modified_base 11: mod_base = OTHER; note = Uracil
  modified_base 16: mod_base = OTHER; note = Uracil
  modified_base 17: mod_base = OTHER; note = Uracil
  modified_base 18: mod_base = OTHER; note = Uracil
tcaaggaagatggcatttct

SEQ ID NO: 12366 - DNA, 20 bp, synthetic construct
  misc_feature 1..20: note = Description of Artificial Sequence: Synthetic Antisense oligonucleotide
  misc_feature 1..20: note = Original Sequence: ucaaggaagauggcauuuct
  modified_base 12: mod_base = OTHER; note = bicyclic nucleic acid (BNA)
  modified_base 20: mod_base = OTHER; note = bicyclic nucleic acid (BNA)
  source 1..20: mol_type = other DNA
  modified_base 1: mod_base = OTHER; note = Uracil
  modified_base 11: mod_base = OTHER; note = Uracil
  modified_base 16: mod_base = OTHER; note = Uracil
  modified_base 17: mod_base = OTHER; note = Uracil
  modified_base 18: mod_base = OTHER; note = Uracil
tcaaggaagatggcatttct

SEQ ID NO: 12367 - DNA, 20 bp, synthetic construct
  misc_feature 1..20: note = Description of Artificial Sequence: Synthetic Antisense oligonucleotide
  misc_feature 1..20: note = Original Sequence: ucaaggaagauggcauuuct
  modified_base 13: mod_base = OTHER; note = bicyclic nucleic acid (BNA)
  modified_base 20: mod_base = OTHER; note = bicyclic nucleic acid (BNA)
  source 1..20: mol_type = other DNA
  modified_base 1: mod_base = OTHER; note = Uracil
  modified_base 11: mod_base = OTHER; note = Uracil
  modified_base 16: mod_base = OTHER; note = Uracil
  modified_base 17: mod_base = OTHER; note = Uracil
  modified_base 18: mod_base = OTHER; note = Uracil
tcaaggaagatggcatttct

SEQ ID NO: 12368 - DNA, 20 bp, synthetic construct
  misc_feature 1..20: note = Description of Artificial Sequence: Synthetic Antisense oligonucleotide
  misc_feature 1..20: note = Original Sequence: ucaaggaagauggcauuuct
  modified_base 14: mod_base = OTHER; note = bicyclic nucleic acid (BNA)
  modified_base 20: mod_base = OTHER; note = bicyclic nucleic acid (BNA)
  source 1..20: mol_type = other DNA
  modified_base 1: mod_base = OTHER; note = Uracil
  modified_base 11: mod_base = OTHER; note = Uracil
  modified_base 16: mod_base = OTHER; note = Uracil
  modified_base 17: mod_base = OTHER; note = Uracil
  modified_base 18: mod_base = OTHER; note = Uracil
tcaaggaagatggcatttct

SEQ ID NO: 12369 - RNA, 22 nt, synthetic construct
  misc_feature 1..22: note = Description of Artificial Sequence: Synthetic Antisense oligonucleotide
  modified_base 2: mod_base = OTHER; note = bicyclic nucleic acid (BNA)
  modified_base 22: mod_base = OTHER; note = bicyclic nucleic acid (BNA)
  source 1..22: mol_type = other RNA
tcaaggaagatggcatttctag

SEQ ID NO: 12370 - RNA, 22 nt, synthetic construct
  misc_feature 1..22: note = Description of Artificial Sequence: Synthetic Antisense oligonucleotide
  modified_base 9: mod_base = OTHER; note = bicyclic nucleic acid (BNA)
  modified_base 22: mod_base = OTHER; note = bicyclic nucleic acid (BNA)
  source 1..22: mol_type = other RNA
tcaaggaagatggcatttctag

SEQ ID NO: 12371 - RNA, 22 nt, synthetic construct
  misc_feature 1..22: note = Description of Artificial Sequence: Synthetic Antisense oligonucleotide
  modified_base 5: mod_base = OTHER; note = bicyclic nucleic acid (BNA)
  modified_base 22: mod_base = OTHER; note = bicyclic nucleic acid (BNA)
  source 1..22: mol_type = other RNA
tcaaggaagatggcatttctag

SEQ ID NO: 12372 - RNA, 22 nt, synthetic construct
  misc_feature 1..22: note = Description of Artificial Sequence: Synthetic Antisense oligonucleotide
  modified_base 6: mod_base = OTHER; note = bicyclic nucleic acid (BNA)
  modified_base 22: mod_base = OTHER; note = bicyclic nucleic acid (BNA)
  source 1..22: mol_type = other RNA
tcaaggaagatggcatttctag

SEQ ID NO: 12373 - RNA, 22 nt, synthetic construct
  misc_feature 1..22: note = Description of Artificial Sequence: Synthetic Antisense oligonucleotide
  modified_base 12: mod_base = OTHER; note = bicyclic nucleic acid (BNA)
  modified_base 22: mod_base = OTHER; note = bicyclic nucleic acid (BNA)
  source 1..22: mol_type = other RNA
tcaaggaagatggcatttctag

SEQ ID NO: 12374 - RNA, 22 nt, synthetic construct
  misc_feature 1..22: note = Description of Artificial Sequence: Synthetic Antisense oligonucleotide
  modified_base 13: mod_base = OTHER; note = bicyclic nucleic acid (BNA)
  modified_base 22: mod_base = OTHER; note = bicyclic nucleic acid (BNA)
  source 1..22: mol_type = other RNA
tcaaggaagatggcatttctag

SEQ ID NO: 12375 - RNA, 22 nt, synthetic construct
  misc_feature 1..22: note = Description of Artificial Sequence: Synthetic Antisense oligonucleotide
  modified_base 19: mod_base = OTHER; note = bicyclic nucleic acid (BNA)
  modified_base 22: mod_base = OTHER; note = bicyclic nucleic acid (BNA)
  source 1..22: mol_type = other RNA
tcaaggaagatggcatttctag

SEQ ID NO: 12376 - RNA, 22 nt, synthetic construct
  misc_feature 1..22: note = Description of Artificial Sequence: Synthetic Antisense oligonucleotide
  modified_base 14: mod_base = OTHER; note = bicyclic nucleic acid (BNA)
  modified_base 22: mod_base = OTHER; note = bicyclic nucleic acid (BNA)
  source 1..22: mol_type = other RNA
tcaaggaagatggcatttctag

SEQ ID NO: 12377 - DNA, 20 bp, synthetic construct
  misc_feature 1..20: note = Description of Artificial Sequence: Synthetic Antisense oligonucleotide
  misc_feature 1..20: note = Original Sequence: ucaaggaagauggcauuuct
  modified_base 9: mod_base = OTHER; note = bicyclic nucleic acid (BNA)
  modified_base 14: mod_base = OTHER; note = bicyclic nucleic acid (BNA)
  modified_base 20: mod_base = OTHER; note = bicyclic nucleic acid (BNA)
  source 1..20: mol_type = other DNA
  modified_base 1: mod_base = OTHER; note = Uracil
  modified_base 11: mod_base = OTHER; note = Uracil
  modified_base 16: mod_base = OTHER; note = Uracil
  modified_base 17: mod_base = OTHER; note = Uracil
  modified_base 18: mod_base = OTHER; note = Uracil
tcaaggaagatggcatttct

SEQ ID NO: 12378 - DNA, 20 bp, synthetic construct
  misc_feature 1..20: note = Description of Artificial Sequence: Synthetic Antisense oligonucleotide
  misc_feature 1..20: note = Original Sequence: ucaaggaagauggcauuuct
  modified_base 5: mod_base = OTHER; note = bicyclic nucleic acid (BNA)
  modified_base 9: mod_base = OTHER; note = bicyclic nucleic acid (BNA)
  modified_base 20: mod_base = OTHER; note = bicyclic nucleic acid (BNA)
  source 1..20: mol_type = other DNA
  modified_base 1: mod_base = OTHER; note = Uracil
  modified_base 11: mod_base = OTHER; note = Uracil
  modified_base 16: mod_base = OTHER; note = Uracil
  modified_base 17: mod_base = OTHER; note = Uracil
  modified_base 18: mod_base = OTHER; note = Uracil
tcaaggaagatggcatttct

SEQ ID NO: 12379 - DNA, 20 bp, synthetic construct
  misc_feature 1..20: note = Description of Artificial Sequence: Synthetic Antisense oligonucleotide
  misc_feature 1..20: note = Original Sequence: ucaaggaagauggcauuuct
  modified_base 6: mod_base = OTHER; note = bicyclic nucleic acid (BNA)
  modified_base 14: mod_base = OTHER; note = bicyclic nucleic acid (BNA)
  modified_base 20: mod_base = OTHER; note = bicyclic nucleic acid (BNA)
  source 1..20: mol_type = other DNA
  modified_base 1: mod_base = OTHER; note = Uracil
  modified_base 11: mod_base = OTHER; note = Uracil
  modified_base 16: mod_base = OTHER; note = Uracil
  modified_base 17: mod_base = OTHER; note = Uracil
  modified_base 18: mod_base = OTHER; note = Uracil
tcaaggaagatggcatttct

SEQ ID NO: 12380 - DNA, 20 bp, synthetic construct
  misc_feature 1..20: note = Description of Artificial Sequence: Synthetic Antisense oligonucleotide
  misc_feature 1..20: note = Original Sequence: ucaaggaagauggcauuuct
  modified_base 5: mod_base = OTHER; note = bicyclic nucleic acid (BNA)
  modified_base 13: mod_base = OTHER; note = bicyclic nucleic acid (BNA)
  modified_base 20: mod_base = OTHER; note = bicyclic nucleic acid (BNA)
  source 1..20: mol_type = other DNA
  modified_base 1: mod_base = OTHER; note = Uracil
  modified_base 11: mod_base = OTHER; note = Uracil
  modified_base 16: mod_base = OTHER; note = Uracil
  modified_base 17: mod_base = OTHER; note = Uracil
  modified_base 18: mod_base = OTHER; note = Uracil
tcaaggaagatggcatttct

SEQ ID NO: 12381 - DNA, 20 bp, synthetic construct
  misc_feature 1..20: note = Description of Artificial Sequence: Synthetic Antisense oligonucleotide
  misc_feature 1..20: note = Original Sequence: ucaaggaagauggcauuuct
  modified_base 2: mod_base = OTHER; note = bicyclic nucleic acid (BNA)
  modified_base 12: mod_base = OTHER; note = bicyclic nucleic acid (BNA)
  modified_base 20: mod_base = OTHER; note = bicyclic nucleic acid (BNA)
  source 1..20: mol_type = other DNA
  modified_base 1: mod_base = OTHER; note = Uracil
  modified_base 11: mod_base = OTHER; note = Uracil
  modified_base 16: mod_base = OTHER; note = Uracil
  modified_base 17: mod_base = OTHER; note = Uracil
  modified_base 18: mod_base = OTHER; note = Uracil
tcaaggaagatggcatttct

SEQ ID NO: 12382 - DNA, 20 bp, synthetic construct
  misc_feature 1..20: note = Description of Artificial Sequence: Synthetic Antisense oligonucleotide
  misc_feature 1..20: note = Original Sequence: ucaaggaagauggcauuuct
  modified_base 6: mod_base = OTHER; note = bicyclic nucleic acid (BNA)
  modified_base 9: mod_base = OTHER; note = bicyclic nucleic acid (BNA)
  modified_base 20: mod_base = OTHER; note = bicyclic nucleic acid (BNA)
  source 1..20: mol_type = other DNA
  modified_base 1: mod_base = OTHER; note = Uracil
  modified_base 11: mod_base = OTHER; note = Uracil
  modified_base 16: mod_base = OTHER; note = Uracil
  modified_base 17: mod_base = OTHER; note = Uracil
  modified_base 18: mod_base = OTHER; note = Uracil
tcaaggaagatggcatttct

SEQ ID NO: 12383 - DNA, 20 bp, synthetic construct
  misc_feature 1..20: note = Description of Artificial Sequence: Synthetic Antisense oligonucleotide
  misc_feature 1..20: note = Original Sequence: ucaaggaagauggcauuuct
  modified_base 13..14: mod_base = OTHER; note = bicyclic nucleic acid (BNA)
  modified_base 20: mod_base = OTHER; note = bicyclic nucleic acid (BNA)
  source 1..20: mol_type = other DNA
  modified_base 1: mod_base = OTHER; note = Uracil
  modified_base 11: mod_base = OTHER; note = Uracil
  modified_base 16: mod_base = OTHER; note = Uracil
  modified_base 17: mod_base = OTHER; note = Uracil
  modified_base 18: mod_base = OTHER; note = Uracil
tcaaggaagatggcatttct

SEQ ID NO: 12384 - DNA, 20 bp, synthetic construct
  misc_feature 1..20: note = Description of Artificial Sequence: Synthetic Antisense oligonucleotide
  misc_feature 1..20: note = Original Sequence: ucaaggaagauggcauuuct
  modified_base 6: mod_base = OTHER; note = bicyclic nucleic acid (BNA)
  modified_base 13: mod_base = OTHER; note = bicyclic nucleic acid (BNA)
  modified_base 20: mod_base = OTHER; note = bicyclic nucleic acid (BNA)
  source 1..20: mol_type = other DNA
  modified_base 1: mod_base = OTHER; note = Uracil
  modified_base 11: mod_base = OTHER; note = Uracil
  modified_base 16: mod_base = OTHER; note = Uracil
  modified_base 17: mod_base = OTHER; note = Uracil
  modified_base 18: mod_base = OTHER; note = Uracil
tcaaggaagatggcatttct

SEQ ID NO: 12385 - DNA, 20 bp, synthetic construct
  misc_feature 1..20: note = Description of Artificial Sequence: Synthetic Antisense oligonucleotide
  misc_feature 1..20: note = Original Sequence: ucaaggaagauggcauuuct
  modified_base 5: mod_base = OTHER; note = bicyclic nucleic acid (BNA)
  modified_base 14: mod_base = OTHER; note = bicyclic nucleic acid (BNA)
  modified_base 20: mod_base = OTHER; note = bicyclic nucleic acid (BNA)
  source 1..20: mol_type = other DNA
  modified_base 1: mod_base = OTHER; note = Uracil
  modified_base 11: mod_base = OTHER; note = Uracil
  modified_base 16: mod_base = OTHER; note = Uracil
  modified_base 17: mod_base = OTHER; note = Uracil
  modified_base 18: mod_base = OTHER; note = Uracil
tcaaggaagatggcatttct

SEQ ID NO: 12386 - DNA, 20 bp, synthetic construct
  misc_feature 1..20: note = Description of Artificial Sequence: Synthetic Antisense oligonucleotide
  misc_feature 1..20: note = Original Sequence: ucaaggaagauggcauuuct
  modified_base 2: mod_base = OTHER; note = bicyclic nucleic acid (BNA)
  modified_base 6: mod_base = OTHER; note = bicyclic nucleic acid (BNA)
  modified_base 20: mod_base = OTHER; note = bicyclic nucleic acid (BNA)
  source 1..20: mol_type = other DNA
  modified_base 1: mod_base = OTHER; note = Uracil
  modified_base 11: mod_base = OTHER; note = Uracil
  modified_base 16: mod_base = OTHER; note = Uracil
  modified_base 17: mod_base = OTHER; note = Uracil
  modified_base 18: mod_base = OTHER; note = Uracil
tcaaggaagatggcatttct

SEQ ID NO: 12387 - DNA, 20 bp, synthetic construct
  misc_feature 1..20: note = Description of Artificial Sequence: Synthetic Antisense oligonucleotide
  misc_feature 1..20: note = Original Sequence: ucaaggaagauggcauuuct
  modified_base 12: mod_base = OTHER; note = bicyclic nucleic acid (BNA)
  modified_base 14: mod_base = OTHER; note = bicyclic nucleic acid (BNA)
  modified_base 20: mod_base = OTHER; note = bicyclic nucleic acid (BNA)
  source 1..20: mol_type = other DNA
  modified_base 1: mod_base = OTHER; note = Uracil
  modified_base 11: mod_base = OTHER; note = Uracil
  modified_base 16: mod_base = OTHER; note = Uracil
  modified_base 17: mod_base = OTHER; note = Uracil
  modified_base 18: mod_base = OTHER; note = Uracil
tcaaggaagatggcatttct

SEQ ID NO: 12388 - DNA, 20 bp, synthetic construct
  misc_feature 1..20: note = Description of Artificial Sequence: Synthetic Antisense oligonucleotide
  misc_feature 1..20: note = Original Sequence: ucaaggaagauggcauuuct
  modified_base 6: mod_base = OTHER; note = bicyclic nucleic acid (BNA)
  modified_base 12: mod_base = OTHER; note = bicyclic nucleic acid (BNA)
  modified_base 20: mod_base = OTHER; note = bicyclic nucleic acid (BNA)
  source 1..20: mol_type = other DNA
  modified_base 1: mod_base = OTHER; note = Uracil
  modified_base 11: mod_base = OTHER; note = Uracil
  modified_base 16: mod_base = OTHER; note = Uracil
  modified_base 17: mod_base = OTHER; note = Uracil
  modified_base 18: mod_base = OTHER; note = Uracil
tcaaggaagatggcatttct

SEQ ID NO: 12389 - DNA, 20 bp, synthetic construct
  misc_feature 1..20: note = Description of Artificial Sequence: Synthetic Antisense oligonucleotide
  misc_feature 1..20: note = Original Sequence: ucaaggaagauggcauuuct
  modified_base 5..6: mod_base = OTHER; note = bicyclic nucleic acid (BNA)
  modified_base 20: mod_base = OTHER; note = bicyclic nucleic acid (BNA)
  source 1..20: mol_type = other DNA
  modified_base 1: mod_base = OTHER; note = Uracil
  modified_base 11: mod_base = OTHER; note = Uracil
  modified_base 16: mod_base = OTHER; note = Uracil
  modified_base 17: mod_base = OTHER; note = Uracil
  modified_base 18: mod_base = OTHER; note = Uracil
tcaaggaagatggcatttct

SEQ ID NO: 12390 - DNA, 20 bp, synthetic construct
  misc_feature 1..20: note = Description of Artificial Sequence: Synthetic Antisense oligonucleotide
  misc_feature 1..20: note = Original Sequence: ucaaggaagauggcauuuct
  modified_base 2: mod_base = OTHER; note = bicyclic nucleic acid (BNA)
  modified_base 14: mod_base = OTHER; note = bicyclic nucleic acid (BNA)
  modified_base 20: mod_base = OTHER; note = bicyclic nucleic acid (BNA)
  source 1..20: mol_type = other DNA
  modified_base 1: mod_base = OTHER; note = Uracil
  modified_base 11: mod_base = OTHER; note = Uracil
  modified_base 16: mod_base = OTHER; note = Uracil
  modified_base 17: mod_base = OTHER; note = Uracil
  modified_base 18: mod_base = OTHER; note = Uracil
tcaaggaagatggcatttct

SEQ ID NO: 12391 - DNA, 20 bp, synthetic construct
  misc_feature 1..20: note = Description of Artificial Sequence: Synthetic Antisense oligonucleotide
  misc_feature 1..20: note = Original Sequence: ucaaggaagauggcauuuct
  modified_base 9: mod_base = OTHER; note = bicyclic nucleic acid (BNA)
  modified_base 12: mod_base = OTHER; note = bicyclic nucleic acid (BNA)
  modified_base 20: mod_base = OTHER; note = bicyclic nucleic acid (BNA)
  source 1..20: mol_type = other DNA
  modified_base 1: mod_base = OTHER; note = Uracil
  modified_base 11: mod_base = OTHER; note = Uracil
  modified_base 16: mod_base = OTHER; note = Uracil
  modified_base 17: mod_base = OTHER; note = Uracil
  modified_base 18: mod_base = OTHER; note = Uracil
tcaaggaagatggcatttct

SEQ ID NO: 12392 - DNA, 20 bp, synthetic construct
  misc_feature 1..20: note = Description of Artificial Sequence: Synthetic Antisense oligonucleotide
  misc_feature 1..20: note = Original Sequence: ucaaggaagauggcauuuct
  modified_base 2: mod_base = OTHER; note = bicyclic nucleic acid (BNA)
  modified_base 5: mod_base = OTHER; note = bicyclic nucleic acid (BNA)
  modified_base 20: mod_base = OTHER; note = bicyclic nucleic acid (BNA)
  source 1..20: mol_type = other DNA
  modified_base 1: mod_base = OTHER; note = Uracil
  modified_base 11: mod_base = OTHER; note = Uracil
  modified_base 16: mod_base = OTHER; note = Uracil
  modified_base 17: mod_base = OTHER; note = Uracil
  modified_base 18: mod_base = OTHER; note = Uracil
tcaaggaagatggcatttct

SEQ ID NO: 12393 - DNA, 20 bp, synthetic construct
  misc_feature 1..20: note = Description of Artificial Sequence: Synthetic Antisense oligonucleotide
  misc_feature 1..20: note = Original Sequence: ucaaggaagauggcauuuct
  modified_base 12..13: mod_base = OTHER; note = bicyclic nucleic acid (BNA)
  modified_base 20: mod_base = OTHER; note = bicyclic nucleic acid (BNA)
  source 1..20: mol_type = other DNA
  modified_base 1: mod_base = OTHER; note = Uracil
  modified_base 11: mod_base = OTHER; note = Uracil
  modified_base 16: mod_base = OTHER; note = Uracil
  modified_base 17: mod_base = OTHER; note = Uracil
  modified_base 18: mod_base = OTHER; note = Uracil
tcaaggaagatggcatttct

SEQ ID NO: 12394 - DNA, 20 bp, synthetic construct
  misc_feature 1..20: note = Description of Artificial Sequence: Synthetic Antisense oligonucleotide
  misc_feature 1..20: note = Original Sequence: ucaaggaagauggcauuuct
  modified_base 5: mod_base = OTHER; note = bicyclic nucleic acid (BNA)
  modified_base 12: mod_base = OTHER; note = bicyclic nucleic acid (BNA)
  modified_base 20: mod_base = OTHER; note = bicyclic nucleic acid (BNA)
  source 1..20: mol_type = other DNA
  modified_base 1: mod_base = OTHER; note = Uracil
  modified_base 11: mod_base = OTHER; note = Uracil
  modified_base 16: mod_base = OTHER; note = Uracil
  modified_base 17: mod_base = OTHER; note = Uracil
  modified_base 18: mod_base = OTHER; note = Uracil
tcaaggaagatggcatttct

SEQ ID NO: 12395 - DNA, 20 bp, synthetic construct
  misc_feature 1..20: note = Description of Artificial Sequence: Synthetic Antisense oligonucleotide
  misc_feature 1..20: note = Original Sequence: ucaaggaagauggcauuuct
  modified_base 2: mod_base = OTHER; note = bicyclic nucleic acid (BNA)
  modified_base 13: mod_base = OTHER; note = bicyclic nucleic acid (BNA)
  modified_base 20: mod_base = OTHER; note = bicyclic nucleic acid (BNA)
  source 1..20: mol_type = other DNA
  modified_base 1: mod_base = OTHER; note = Uracil
  modified_base 11: mod_base = OTHER; note = Uracil
  modified_base 16: mod_base = OTHER; note = Uracil
  modified_base 17: mod_base = OTHER; note = Uracil
  modified_base 18: mod_base = OTHER; note = Uracil
tcaaggaagatggcatttct

SEQ ID NO: 12396 - DNA, 20 bp, synthetic construct
  misc_feature 1..20: note = Description of Artificial Sequence: Synthetic Antisense oligonucleotide
  misc_feature 1..20: note = Original Sequence: ucaaggaagauggcauuuct
  modified_base 9: mod_base = OTHER; note = bicyclic nucleic acid (BNA)
  modified_base 13: mod_base = OTHER; note = bicyclic nucleic acid (BNA)
  modified_base 20: mod_base = OTHER; note = bicyclic nucleic acid (BNA)
  source 1..20: mol_type = other DNA
  modified_base 1: mod_base = OTHER; note = Uracil
  modified_base 11: mod_base = OTHER; note = Uracil
  modified_base 16: mod_base = OTHER; note = Uracil
  modified_base 17: mod_base = OTHER; note = Uracil
  modified_base 18: mod_base = OTHER; note = Uracil
tcaaggaagatggcatttct

SEQ ID NO: 12397 - DNA, 20 bp, synthetic construct
  misc_feature 1..20: note = Description of Artificial Sequence: Synthetic Antisense oligonucleotide
  misc_feature 1..20: note = Original Sequence: ucaaggaagauggcauuuct
  modified_base 2: mod_base = OTHER; note = bicyclic nucleic acid (BNA)
  modified_base 9: mod_base = OTHER; note = bicyclic nucleic acid (BNA)
  modified_base 20: mod_base = OTHER; note = bicyclic nucleic acid (BNA)
  source 1..20: mol_type = other DNA
  modified_base 1: mod_base = OTHER; note = Uracil
  modified_base 11: mod_base = OTHER; note = Uracil
  modified_base 16: mod_base = OTHER; note = Uracil
  modified_base 17: mod_base = OTHER; note = Uracil
  modified_base 18: mod_base = OTHER; note = Uracil
tcaaggaagatggcatttct

SEQ ID NO: 12398 - RNA, 22 nt, synthetic construct
  misc_feature 1..22: note = Description of Artificial Sequence: Synthetic Antisense oligonucleotide
  modified_base 9: mod_base = OTHER; note = bicyclic nucleic acid (BNA)
  modified_base 14: mod_base = OTHER; note = bicyclic nucleic acid (BNA)
  modified_base 22: mod_base = OTHER; note = bicyclic nucleic acid (BNA)
  source 1..22: mol_type = other RNA
tcaaggaagatggcatttctag

SEQ ID NO: 12399 - RNA, 22 nt, synthetic construct
  misc_feature 1..22: note = Description of Artificial Sequence: Synthetic Antisense oligonucleotide
  modified_base 5: mod_base = OTHER; note = bicyclic nucleic acid (BNA)
  modified_base 9: mod_base = OTHER; note = bicyclic nucleic acid (BNA)
  modified_base 22: mod_base = OTHER; note = bicyclic nucleic acid (BNA)
  source 1..22: mol_type = other RNA
tcaaggaagatggcatttctag

SEQ ID NO: 12400 - RNA, 22 nt, synthetic construct
  misc_feature 1..22: note = Description of Artificial Sequence: Synthetic Antisense oligonucleotide
  modified_base 5: mod_base = OTHER; note = bicyclic nucleic acid (BNA)
  modified_base 19: mod_base = OTHER; note = bicyclic nucleic acid (BNA)
  modified_base 22: mod_base = OTHER; note = bicyclic nucleic acid (BNA)
  source 1..22: mol_type = other RNA
tcaaggaagatggcatttctag

SEQ ID NO: 12401 - RNA, 22 nt, synthetic construct
  misc_feature 1..22: note = Description of Artificial Sequence: Synthetic Antisense oligonucleotide
  modified_base 6: mod_base = OTHER; note = bicyclic nucleic acid (BNA)
  modified_base 14: mod_base = OTHER; note = bicyclic nucleic acid (BNA)
  modified_base 22: mod_base = OTHER; note = bicyclic nucleic acid (BNA)
  source 1..22: mol_type = other RNA
tcaaggaagatggcatttctag

SEQ ID NO: 12402 - RNA, 22 nt, synthetic construct
  misc_feature 1..22: note = Description of Artificial Sequence: Synthetic Antisense oligonucleotide
  modified_base 5: mod_base = OTHER; note = bicyclic nucleic acid (BNA)
  modified_base 13: mod_base = OTHER; note = bicyclic nucleic acid (BNA)
  modified_base 22: mod_base = OTHER; note = bicyclic nucleic acid (BNA)
  source 1..22: mol_type = other RNA
tcaaggaagatggcatttctag

SEQ ID NO: 12403 - RNA, 22 nt, synthetic construct
  misc_feature 1..22: note = Description of Artificial Sequence: Synthetic Antisense oligonucleotide
  modified_base 2: mod_base = OTHER; note = bicyclic nucleic acid (BNA)
  modified_base 12: mod_base = OTHER; note = bicyclic nucleic acid (BNA)
  modified_base 22: mod_base = OTHER; note = bicyclic nucleic acid (BNA)
  source 1..22: mol_type = other RNA
tcaaggaagatggcatttctag

SEQ ID NO: 12404 - RNA, 22 nt, synthetic construct
  misc_feature 1..22: note = Description of Artificial Sequence: Synthetic Antisense oligonucleotide
  modified_base 6: mod_base = OTHER; note = bicyclic nucleic acid (BNA)
  modified_base 9: mod_base = OTHER; note = bicyclic nucleic acid (BNA)
  modified_base 22: mod_base = OTHER; note = bicyclic nucleic acid (BNA)
  source 1..22: mol_type = other RNA
tcaaggaagatggcatttctag

SEQ ID NO: 12405 - RNA, 22 nt, synthetic construct
  misc_feature 1..22: note = Description of Artificial Sequence: Synthetic Antisense oligonucleotide
  modified_base 13..14: mod_base = OTHER; note = bicyclic nucleic acid (BNA)
  modified_base 22: mod_base = OTHER; note = bicyclic nucleic acid (BNA)
  source 1..22: mol_type = other RNA
tcaaggaagatggcatttctag

SEQ ID NO: 12406 - RNA, 22 nt, synthetic construct
  misc_feature 1..22: note = Description of Artificial Sequence: Synthetic Antisense oligonucleotide
  modified_base 6: mod_base = OTHER; note = bicyclic nucleic acid (BNA)
  modified_base 13: mod_base = OTHER; note = bicyclic nucleic acid (BNA)
  modified_base 22: mod_base = OTHER; note = bicyclic nucleic acid (BNA)
  source 1..22: mol_type = other RNA
tcaaggaagatggcatttctag

SEQ ID NO: 12407 - RNA, 22 nt, synthetic construct
  misc_feature 1..22: note = Description of Artificial Sequence: Synthetic Antisense oligonucleotide
  modified_base 6: mod_base = OTHER; note = bicyclic nucleic acid (BNA)
  modified_base 19: mod_base = OTHER; note = bicyclic nucleic acid (BNA)
  modified_base 22: mod_base = OTHER; note = bicyclic nucleic acid (BNA)
  source 1..22: mol_type = other RNA
tcaaggaagatggcatttctag

SEQ ID NO: 12408 - RNA, 22 nt, synthetic construct
  misc_feature 1..22: note = Description of Artificial Sequence: Synthetic Antisense oligonucleotide
  modified_base 5: mod_base = OTHER; note = bicyclic nucleic acid (BNA)
  modified_base 14: mod_base = OTHER; note = bicyclic nucleic acid (BNA)
  modified_base 22: mod_base = OTHER; note = bicyclic nucleic acid (BNA)
  source 1..22: mol_type = other RNA
tcaaggaagatggcatttctag

SEQ ID NO: 12409 - RNA, 22 nt, synthetic construct
  misc_feature 1..22: note = Description of Artificial Sequence: Synthetic Antisense oligonucleotide
  modified_base 2: mod_base = OTHER; note = bicyclic nucleic acid (BNA)
  modified_base 6: mod_base = OTHER; note = bicyclic nucleic acid (BNA)
  modified_base 22: mod_base = OTHER; note = bicyclic nucleic acid (BNA)
  source 1..22: mol_type = other RNA
tcaaggaagatggcatttctag

SEQ ID NO: 12410 - RNA, 22 nt, synthetic construct
  misc_feature 1..22: note = Description of Artificial Sequence: Synthetic Antisense oligonucleotide
  modified_base 12: mod_base = OTHER; note = bicyclic nucleic acid (BNA)
  modified_base 19: mod_base = OTHER; note = bicyclic nucleic acid (BNA)
  modified_base 22: mod_base = OTHER; note = bicyclic nucleic acid (BNA)
  source 1..22: mol_type = other RNA
tcaaggaagatggcatttctag

SEQ ID NO: 12411 - RNA, 22 nt, synthetic construct
  misc_feature 1..22: note = Description of Artificial Sequence: Synthetic Antisense oligonucleotide
  modified_base 12: mod_base = OTHER; note = bicyclic nucleic acid (BNA)
  modified_base 14: mod_base = OTHER; note = bicyclic nucleic acid (BNA)
  modified_base 22: mod_base = OTHER; note = bicyclic nucleic acid (BNA)
  source 1..22: mol_type = other RNA
tcaaggaagatggcatttctag

SEQ ID NO: 12412 - RNA, 22 nt, synthetic construct
  misc_feature 1..22: note = Description of Artificial Sequence: Synthetic Antisense oligonucleotide
  modified_base 6: mod_base = OTHER; note = bicyclic nucleic acid (BNA)
  modified_base 12: mod_base = OTHER; note = bicyclic nucleic acid (BNA)
  modified_base 22: mod_base = OTHER; note = bicyclic nucleic acid (BNA)
  source 1..22: mol_type = other RNA
tcaaggaagatggcatttctag

SEQ ID NO: 12413 - RNA, 22 nt, synthetic construct
  misc_feature 1..22: note = Description of Artificial Sequence: Synthetic Antisense oligonucleotide
  modified_base 5..6: mod_base = OTHER; note = bicyclic nucleic acid (BNA)
  modified_base 22: mod_base = OTHER; note = bicyclic nucleic acid (BNA)
  source 1..22: mol_type = other RNA
tcaaggaagatggcatttctag

SEQ ID NO: 12414 - RNA, 22 nt, synthetic construct
  misc_feature 1..22: note = Description of Artificial Sequence: Synthetic Antisense oligonucleotide
  modified_base 2: mod_base = OTHER; note = bicyclic nucleic acid (BNA)
  modified_base 14: mod_base = OTHER; note = bicyclic nucleic acid (BNA)
  modified_base 22: mod_base = OTHER; note = bicyclic nucleic acid (BNA)
  source 1..22: mol_type = other RNA
tcaaggaagatggcatttctag

SEQ ID NO: 12415 - RNA, 22 nt, synthetic construct
  misc_feature 1..22: note = Description of Artificial Sequence: Synthetic Antisense oligonucleotide
  modified_base 9: mod_base = OTHER; note = bicyclic nucleic acid (BNA)
  modified_base 12: mod_base = OTHER; note = bicyclic nucleic acid (BNA)
  modified_base 22: mod_base = OTHER; note = bicyclic nucleic acid (BNA)
  source 1..22: mol_type = other RNA
tcaaggaagatggcatttctag

SEQ ID NO: 12416 - RNA, 22 nt, synthetic construct
  misc_feature 1..22: note = Description of Artificial Sequence: Synthetic Antisense oligonucleotide
  modified_base 2: mod_base = OTHER; note = bicyclic nucleic acid (BNA)
  modified_base 5: mod_base = OTHER; note = bicyclic nucleic acid (BNA)
  modified_base 22: mod_base = OTHER; note = bicyclic nucleic acid (BNA)
  source 1..22: mol_type = other RNA
tcaaggaagatggcatttctag

SEQ ID NO: 12417 - RNA, 22 nt, synthetic construct
  misc_feature 1..22: note = Description of Artificial Sequence: Synthetic Antisense oligonucleotide
  modified_base 13: mod_base = OTHER; note = bicyclic nucleic acid (BNA)
  modified_base 19: mod_base = OTHER; note = bicyclic nucleic acid (BNA)
  modified_base 22: mod_base = OTHER; note = bicyclic nucleic acid (BNA)
  source 1..22: mol_type = other RNA
tcaaggaagatggcatttctag

SEQ ID NO: 12418 - RNA, 22 nt, synthetic construct
  misc_feature 1..22: note = Description of Artificial Sequence: Synthetic Antisense oligonucleotide
  modified_base 12..13: mod_base = OTHER; note = bicyclic nucleic acid (BNA)
  modified_base 22: mod_base = OTHER; note = bicyclic nucleic acid (BNA)
  source 1..22: mol_type = other RNA
tcaaggaagatggcatttctag

SEQ ID NO: 12419 - RNA, 22 nt, synthetic construct
  misc_feature 1..22: note = Description of Artificial Sequence: Synthetic Antisense oligonucleotide
  modified_base 5: mod_base = OTHER; note = bicyclic nucleic acid (BNA)
  modified_base 12: mod_base = OTHER; note = bicyclic nucleic acid (BNA)
  modified_base 22: mod_base = OTHER; note = bicyclic nucleic acid (BNA)
  source 1..22: mol_type = other RNA
tcaaggaagatggcatttctag

SEQ ID NO: 12420 - RNA, 22 nt, synthetic construct
  misc_feature 1..22: note = Description of Artificial Sequence: Synthetic Antisense oligonucleotide
  modified_base 2: mod_base = OTHER; note = bicyclic nucleic acid (BNA)
  modified_base 13: mod_base = OTHER; note = bicyclic nucleic acid (BNA)
  modified_base 22: mod_base = OTHER; note = bicyclic nucleic acid (BNA)
  source 1..22: mol_type = other RNA
tcaaggaagatggcatttctag

SEQ ID NO: 12421 - RNA, 22 nt, synthetic construct
  misc_feature 1..22: note = Description of Artificial Sequence: Synthetic Antisense oligonucleotide
  modified_base 9: mod_base = OTHER; note = bicyclic nucleic acid (BNA)
  modified_base 13: mod_base = OTHER; note = bicyclic nucleic acid (BNA)
  modified_base 22: mod_base = OTHER; note = bicyclic nucleic acid (BNA)
  source 1..22: mol_type = other RNA
tcaaggaagatggcatttctag

SEQ ID NO: 12422 - RNA, 22 nt, synthetic construct
  misc_feature 1..22: note = Description of Artificial Sequence: Synthetic Antisense oligonucleotide
  modified_base 2: mod_base = OTHER; note = bicyclic nucleic acid (BNA)
  modified_base 19: mod_base = OTHER; note = bicyclic nucleic acid (BNA)
  modified_base 22: mod_base = OTHER; note = bicyclic nucleic acid (BNA)
  source 1..22: mol_type = other RNA
tcaaggaagatggcatttctag

SEQ ID NO: 12423 - RNA, 22 nt, synthetic construct
  misc_feature 1..22: note = Description of Artificial Sequence: Synthetic Antisense oligonucleotide
  modified_base 2: mod_base = OTHER; note = bicyclic nucleic acid (BNA)
  modified_base 9: mod_base = OTHER; note = bicyclic nucleic acid (BNA)
  modified_base 22: mod_base = OTHER; note = bicyclic nucleic acid (BNA)
  source 1..22: mol_type = other RNA
tcaaggaagatggcatttctag

SEQ ID NO: 12424 - RNA, 22 nt, synthetic construct
  misc_feature 1..22: note = Description of Artificial Sequence: Synthetic Antisense oligonucleotide
  modified_base 14: mod_base = OTHER; note = bicyclic nucleic acid (BNA)
  modified_base 19: mod_base = OTHER; note = bicyclic nucleic acid (BNA)
  modified_base 22: mod_base = OTHER; note = bicyclic nucleic acid (BNA)
  source 1..22: mol_type = other RNA
tcaaggaagatggcatttctag

SEQ ID NO: 12425 - RNA, 22 nt, synthetic construct
  misc_feature 1..22: note = Description of Artificial Sequence: Synthetic Antisense oligonucleotide
  modified_base 9: mod_base = OTHER; note = bicyclic nucleic acid (BNA)
  modified_base 19: mod_base = OTHER; note = bicyclic nucleic acid (BNA)
  modified_base 22: mod_base = OTHER; note = bicyclic nucleic acid (BNA)
  source 1..22: mol_type = other RNA
tcaaggaagatggcatttctag

SEQ ID NO: 12426 - RNA, 18 nt, synthetic construct
  misc_feature 1..18: note = Description of Artificial Sequence: Synthetic Antisense oligonucleotide
  modified_base 2: mod_base = OTHER; note = bicyclic nucleic acid (BNA)
  modified_base 18: mod_base = OTHER; note = bicyclic nucleic acid (BNA)
  modified_base 9: mod_base = OTHER; note = 5-methyl
  modified_base 13..14: mod_base = OTHER; note = 5-methyl
  modified_base 18: mod_base = OTHER; note = 5-methyl
  source 1..18: mol_type = other RNA
ggtaagttctgtccaagc

SEQ ID NO: 12427 - RNA, 18 nt, synthetic construct
  misc_feature 1..18: note = Description of Artificial Sequence: Synthetic Antisense oligonucleotide
  modified_base 9: mod_base = OTHER; note = 5-methyl
  modified_base 13..14: mod_base = OTHER; note = 5-methyl
  modified_base 18: mod_base = OTHER; note = 5-methyl
  modified_base 9: mod_base = OTHER; note = bicyclic nucleic acid (BNA)
  modified_base 18: mod_base = OTHER; note = bicyclic nucleic acid (BNA)
  source 1..18: mol_type = other RNA
ggtaagttctgtccaagc

SEQ ID NO: 12428 - RNA, 18 nt, synthetic construct
  misc_feature 1..18: note = Description of Artificial Sequence: Synthetic Antisense oligonucleotide
  modified_base 9: mod_base = OTHER; note = 5-methyl
  modified_base 13..14: mod_base = OTHER; note = 5-methyl
  modified_base 18: mod_base = OTHER; note = 5-methyl
  modified_base 11: mod_base = OTHER; note = bicyclic nucleic acid (BNA)
  modified_base 18: mod_base = OTHER; note = bicyclic nucleic acid (BNA)
  source 1..18: mol_type = other RNA
ggtaagttctgtccaagc

SEQ ID NO: 12429 - RNA, 18 nt, synthetic construct
  misc_feature 1..18: note = Description of Artificial Sequence: Synthetic Antisense oligonucleotide
  modified_base 6: mod_base = OTHER; note = bicyclic nucleic acid (BNA)
  modified_base 18: mod_base = OTHER; note = bicyclic nucleic acid (BNA)
  modified_base 9: mod_base = OTHER; note = 5-methyl
  modified_base 13..14: mod_base = OTHER; note = 5-methyl
  modified_base 18: mod_base = OTHER; note = 5-methyl
  source 1..18: mol_type = other RNA
ggtaagttctgtccaagc

SEQ ID NO: 12430 - RNA, 18 nt, synthetic construct
  misc_feature 1..18: note = Description of Artificial Sequence: Synthetic Antisense oligonucleotide
  modified_base 9: mod_base = OTHER; note = 5-methyl
  modified_base 13..14: mod_base = OTHER; note = 5-methyl
  modified_base 18: mod_base = OTHER; note = 5-methyl
  modified_base 13: mod_base = OTHER; note = bicyclic nucleic acid (BNA)
  modified_base 18: mod_base = OTHER; note = bicyclic nucleic acid (BNA)
  source 1..18: mol_type = other RNA
ggtaagttctgtccaagc

SEQ ID NO: 12431 - RNA, 18 nt, synthetic construct
  misc_feature 1..18: note = Description of Artificial Sequence: Synthetic Antisense oligonucleotide
  modified_base 9: mod_base = OTHER; note = 5-methyl
  modified_base 13..14: mod_base = OTHER; note = 5-methyl
  modified_base 18: mod_base = OTHER; note = 5-methyl
  modified_base 14: mod_base = OTHER; note = bicyclic nucleic acid (BNA)
  modified_base 18: mod_base = OTHER; note = bicyclic nucleic acid (BNA)
  source 1..18: mol_type = other RNA
ggtaagttctgtccaagc

SEQ ID NO: 12432 - RNA, 18 nt, synthetic construct
  misc_feature 1..18: note = Description of Artificial Sequence: Synthetic Antisense oligonucleotide
  modified_base 8: mod_base = OTHER; note = 5-methyl
  modified_base 12..13: mod_base = OTHER; note = 5-methyl
  modified_base 17..18: mod_base = OTHER; note = 5-methyl
  modified_base 16: mod_base = OTHER; note = bicyclic nucleic acid (BNA)
  modified_base 18: mod_base = OTHER; note = bicyclic nucleic acid (BNA)
  source 1..18: mol_type = other RNA
gtaagttctgtccaagcc

SEQ ID NO: 12433 - RNA, 18 nt, synthetic construct
  misc_feature 1..18: note = Description of Artificial Sequence: Synthetic Antisense oligonucleotide
  modified_base 8: mod_base = OTHER; note = 5-methyl
  modified_base 12..13: mod_base = OTHER; note = 5-methyl
  modified_base 17..18: mod_base = OTHER; note = 5-methyl
  modified_base 10: mod_base = OTHER; note = bicyclic nucleic acid (BNA)
  modified_base 18: mod_base = OTHER; note = bicyclic nucleic acid (BNA)
  source 1..18: mol_type = other RNA
gtaagttctgtccaagcc

SEQ ID NO: 12434 - RNA, 18 nt, synthetic construct
  misc_feature 1..18: note = Description of Artificial Sequence: Synthetic Antisense oligonucleotide
  modified_base 5: mod_base = OTHER; note = bicyclic nucleic acid (BNA)
  modified_base 18: mod_base = OTHER; note = bicyclic nucleic acid (BNA)
  modified_base 8: mod_base = OTHER; note = 5-methyl
  modified_base 12..13: mod_base = OTHER; note = 5-methyl
  modified_base 17..18: mod_base = OTHER; note = 5-methyl
  source 1..18: mol_type = other RNA
gtaagttctgtccaagcc

SEQ ID NO: 12435 - RNA, 18 nt, synthetic construct
  misc_feature 1..18: note = Description of Artificial Sequence: Synthetic Antisense oligonucleotide
  modified_base 8: mod_base = OTHER; note = 5-methyl
  modified_base 12..13: mod_base = OTHER; note = 5-methyl
  modified_base 17..18: mod_base = OTHER; note = 5-methyl
  modified_base 12: mod_base = OTHER; note = bicyclic nucleic acid (BNA)
  modified_base 18: mod_base = OTHER; note = bicyclic nucleic acid (BNA)
  source 1..18: mol_type = other RNA
gtaagttctgtccaagcc

SEQ ID NO: 12436 - RNA, 18 nt, synthetic construct
  misc_feature 1..18: note = Description of Artificial Sequence: Synthetic Antisense oligonucleotide
  modified_base 8: mod_base = OTHER; note = 5-methyl
  modified_base 12..13: mod_base = OTHER; note = 5-methyl
  modified_base 17..18: mod_base = OTHER; note = 5-methyl
  modified_base 13: mod_base = OTHER; note = bicyclic nucleic acid (BNA)
  modified_base 18: mod_base = OTHER; note = bicyclic nucleic acid (BNA)
  source 1..18: mol_type = other RNA
gtaagttctgtccaagcc

SEQ ID NO: 12437 - RNA, 18 nt, synthetic construct
  misc_feature 1..18: note = Description of Artificial Sequence: Synthetic Antisense oligonucleotide
  modified_base 8: mod_base = OTHER; note = 5-methyl
  modified_base 12..13: mod_base = OTHER; note = 5-methyl
  modified_base 17..18: mod_base = OTHER; note = 5-methyl
  modified_base 8: mod_base = OTHER; note = bicyclic nucleic acid (BNA)
  modified_base 18: mod_base = OTHER; note = bicyclic nucleic acid (BNA)
  source 1..18: mol_type = other RNA
gtaagttctgtccaagcc

SEQ ID NO: 12438 - RNA, 18 nt, synthetic construct
  misc_feature 1..18: note = Description of Artificial Sequence: Synthetic Antisense oligonucleotide
  modified_base 2: mod_base = OTHER; note = bicyclic nucleic acid (BNA)
  modified_base 18: mod_base = OTHER; note = bicyclic nucleic acid (BNA)
  modified_base 4: mod_base = OTHER; note = 5-methyl
  modified_base 13: mod_base = OTHER; note = 5-methyl
  modified_base 17..18: mod_base = OTHER; note = 5-methyl
  source 1..18: mol_type = other RNA
agtcggtaagttctgtcc

SEQ ID NO: 12439 - RNA, 18 nt, synthetic construct
  misc_feature 1..18: note = Description of Artificial Sequence: Synthetic Antisense oligonucleotide
  modified_base 4: mod_base = OTHER; note = 5-methyl
  modified_base 13: mod_base = OTHER; note = 5-methyl
  modified_base 17..18: mod_base = OTHER; note = 5-methyl
  modified_base 4: mod_base = OTHER; note = bicyclic nucleic acid (BNA)
  modified_base 18: mod_base = OTHER; note = bicyclic nucleic acid (BNA)
  source 1..18: mol_type = other RNA
agtcggtaagttctgtcc

SEQ ID NO: 12440 - RNA, 18 nt, synthetic construct
  misc_feature 1..18: note = Description of Artificial Sequence: Synthetic Antisense oligonucleotide
  modified_base 4: mod_base = OTHER; note = 5-methyl
  modified_base 13: mod_base = OTHER; note = 5-methyl
  modified_base 17..18: mod_base = OTHER; note = 5-methyl
  modified_base 10: mod_base = OTHER; note = bicyclic nucleic acid (BNA)
  modified_base 18: mod_base = OTHER; note = bicyclic nucleic acid (BNA)
  source 1..18: mol_type = other RNA
agtcggtaagttctgtcc

SEQ ID NO: 12441 - RNA, 18 nt, synthetic construct
  misc_feature 1..18: note = Description of Artificial Sequence: Synthetic Antisense oligonucleotide
  modified_base 4: mod_base = OTHER; note = 5-methyl
  modified_base 13: mod_base = OTHER; note = 5-methyl
  modified_base 17..18: mod_base = OTHER; note = 5-methyl
  modified_base 5: mod_base = OTHER; note = bicyclic nucleic acid (BNA)
  modified_base 18: mod_base = OTHER; note = bicyclic nucleic acid (BNA)
  source 1..18: mol_type = other RNA
agtcggtaagttctgtcc

SEQ ID NO: 12442 - RNA, 18 nt, synthetic construct
  misc_feature 1..18: note = Description of Artificial Sequence: Synthetic Antisense oligonucleotide
  modified_base 4: mod_base = OTHER; note = 5-methyl
  modified_base 13: mod_base = OTHER; note = 5-methyl
  modified_base 17..18: mod_base = OTHER; note = 5-methyl
  modified_base 6: mod_base = OTHER; note = bicyclic nucleic acid (BNA)
  modified_base 18: mod_base = OTHER; note = bicyclic nucleic acid (BNA)
  source 1..18: mol_type = other RNA
agtcggtaagttctgtcc

SEQ ID NO: 12443 - RNA, 18 nt, synthetic construct
  misc_feature 1..18: note = Description of Artificial Sequence: Synthetic Antisense oligonucleotide
  modified_base 4: mod_base = OTHER; note = 5-methyl
  modified_base 13: mod_base = OTHER; note = 5-methyl
  modified_base 17..18: mod_base = OTHER; note = 5-methyl
  modified_base 13: mod_base = OTHER; note = bicyclic nucleic acid (BNA)
  modified_base 18: mod_base = OTHER; note = bicyclic nucleic acid (BNA)
  source 1..18: mol_type = other RNA
agtcggtaagttctgtcc

SEQ ID NO: 12444 - RNA, 18 nt, synthetic construct
  misc_feature 1..18: note = Description of Artificial Sequence: Synthetic Antisense oligonucleotide
  modified_base 4: mod_base = OTHER; note = 5-methyl
  modified_base 13: mod_base = OTHER; note = 5-methyl
  modified_base 17..18: mod_base = OTHER; note = 5-methyl
  modified_base 15: mod_base = OTHER; note = bicyclic nucleic acid (BNA)
  modified_base 18: mod_base = OTHER; note = bicyclic nucleic acid (BNA)
  source 1..18: mol_type = other RNA
agtcggtaagttctgtcc

SEQ ID NO: 12445 - RNA, 18 nt, synthetic construct
  misc_feature 1..18: note = Description of Artificial Sequence: Synthetic Antisense oligonucleotide
  modified_base 1: mod_base = OTHER; note = 5-methyl
  modified_base 5..6: mod_base = OTHER; note = 5-methyl
  modified_base 10..12: mod_base = OTHER; note = 5-methyl
  modified_base 3: mod_base = OTHER; note = bicyclic nucleic acid (BNA)
  modified_base 18: mod_base = OTHER; note = bicyclic nucleic acid (BNA)
  source 1..18: mol_type = other RNA
ctgtccaagcccggttga

SEQ ID NO: 12446 - RNA, 18 nt, synthetic construct
  misc_feature 1..18: note = Description of Artificial Sequence: Synthetic Antisense oligonucleotide
  modified_base 1: mod_base = OTHER; note = 5-methyl
  modified_base 5..6: mod_base = OTHER; note = 5-methyl
  modified_base 10..12: mod_base = OTHER; note = 5-methyl
  modified_base 9: mod_base = OTHER; note = bicyclic nucleic acid (BNA)
  modified_base 18: mod_base = OTHER; note = bicyclic nucleic acid (BNA)
  source 1..18: mol_type = other RNA
ctgtccaagcccggttga

SEQ ID NO: 12447 - RNA, 18 nt, synthetic construct
  misc_feature 1..18: note = Description of Artificial Sequence: Synthetic Antisense oligonucleotide
  modified_base 1: mod_base = OTHER; note = 5-methyl
  modified_base 5..6: mod_base = OTHER; note = 5-methyl
  modified_base 10..12: mod_base = OTHER; note = 5-methyl
  modified_base 10: mod_base = OTHER; note = bicyclic nucleic acid (BNA)
  modified_base 18: mod_base = OTHER; note = bicyclic nucleic acid (BNA)
  source 1..18: mol_type = other RNA
ctgtccaagcccggttga

SEQ ID NO: 12448 - RNA, 18 nt, synthetic construct
  misc_feature 1..18: note = Description of Artificial Sequence: Synthetic Antisense oligonucleotide
  modified_base 1: mod_base = OTHER; note = 5-methyl
  modified_base 5..6: mod_base = OTHER; note = 5-methyl
  modified_base 10..12: mod_base = OTHER; note = 5-methyl
  modified_base 5: mod_base = OTHER; note = bicyclic nucleic acid (BNA)
  modified_base 18: mod_base = OTHER; note = bicyclic nucleic acid (BNA)
  source 1..18: mol_type = other RNA
ctgtccaagcccggttga

SEQ ID NO: 12449 - RNA, 18 nt, synthetic construct
  misc_feature 1..18: note = Description of Artificial Sequence: Synthetic Antisense oligonucleotide
  modified_base 1: mod_base = OTHER; note = 5-methyl
  modified_base 5..6: mod_base = OTHER; note = 5-methyl
  modified_base 10..12: mod_base = OTHER; note = 5-methyl
  modified_base 11: mod_base = OTHER; note = bicyclic nucleic acid (BNA)
  modified_base 18: mod_base = OTHER; note = bicyclic nucleic acid (BNA)
  source 1..18: mol_type = other RNA
ctgtccaagcccggttga

SEQ ID NO: 12450 - RNA, 18 nt, synthetic construct
  misc_feature 1..18: note = Description of Artificial Sequence: Synthetic Antisense oligonucleotide
  modified_base 1: mod_base = OTHER; note = 5-methyl
  modified_base 5..6: mod_base = OTHER; note = 5-methyl
  modified_base 10..12: mod_base = OTHER; note = 5-methyl
  modified_base 6: mod_base = OTHER; note = bicyclic nucleic acid (BNA)
  modified_base 18: mod_base = OTHER; note = bicyclic nucleic acid (BNA)
  source 1..18: mol_type = other RNA
ctgtccaagcccggttga

SEQ ID NO: 12451 - RNA, 18 nt, synthetic construct
  misc_feature 1..18: note = Description of Artificial Sequence: Synthetic Antisense oligonucleotide
  modified_base 1: mod_base = OTHER; note = 5-methyl
  modified_base 5..6: mod_base = OTHER; note = 5-methyl
  modified_base 10..12: mod_base = OTHER; note = 5-methyl
  modified_base 12: mod_base = OTHER; note = bicyclic nucleic acid (BNA)
  modified_base 18: mod_base = OTHER; note = bicyclic nucleic acid (BNA)
  source 1..18: mol_type = other RNA
ctgtccaagcccggttga

SEQ ID NO: 12452 - RNA, 18 nt, synthetic construct
  misc_feature 1..18: note = Description of Artificial Sequence: Synthetic Antisense oligonucleotide
  modified_base 1: mod_base = OTHER; note = 5-methyl
  modified_base 5..6: mod_base = OTHER; note = 5-methyl
  modified_base 10..12: mod_base = OTHER; note = 5-methyl
  modified_base 13: mod_base = OTHER; note = bicyclic nucleic acid (BNA)
  modified_base 18: mod_base = OTHER; note = bicyclic nucleic acid (BNA)
  source 1..18: mol_type = other RNA
ctgtccaagcccggttga

SEQ ID NO: 12453 - RNA, 18 nt, synthetic construct
  misc_feature 1..18: note = Description of Artificial Sequence: Synthetic Antisense oligonucleotide
  modified_base 1: mod_base = OTHER; note = 5-methyl
  modified_base 5..6: mod_base = OTHER; note = 5-methyl
  modified_base 10..12: mod_base = OTHER; note = 5-methyl
  modified_base 14: mod_base = OTHER; note = bicyclic nucleic acid (BNA)
  modified_base 18: mod_base = OTHER; note = bicyclic nucleic acid (BNA)
  source 1..18: mol_type = other RNA
ctgtccaagcccggttga

SEQ ID NO: 12454 - RNA, 18 nt, synthetic construct
  misc_feature 1..18: note = Description of Artificial Sequence: Synthetic Antisense oligonucleotide
  modified_base 6: mod_base = OTHER; note = bicyclic nucleic acid (BNA)
  modified_base 11: mod_base = OTHER; note = bicyclic nucleic acid (BNA)
  modified_base 18: mod_base = OTHER; note = bicyclic nucleic acid (BNA)
  modified_base 9: mod_base = OTHER; note = 5-methyl
  modified_base 13..14: mod_base = OTHER; note = 5-methyl
  modified_base 18: mod_base = OTHER; note = 5-methyl
  source 1..18: mol_type = other RNA
ggtaagttctgtccaagc

SEQ ID NO: 12455 - RNA, 18 nt, synthetic construct
  misc_feature 1..18: note = Description of Artificial Sequence: Synthetic Antisense oligonucleotide
  modified_base 9: mod_base = OTHER; note = 5-methyl
  modified_base 13..14: mod_base = OTHER; note = 5-methyl
  modified_base 18: mod_base = OTHER; note = 5-methyl
  modified_base 9: mod_base = OTHER; note = bicyclic nucleic acid (BNA)
  modified_base 14: mod_base = OTHER; note = bicyclic nucleic acid (BNA)
  modified_base 18: mod_base = OTHER; note = bicyclic nucleic acid (BNA)
  source 1..18: mol_type = other RNA
ggtaagttctgtccaagc

SEQ ID NO: 12456 - RNA, 18 nt, synthetic construct
  misc_feature 1..18: note = Description of Artificial Sequence: Synthetic Antisense oligonucleotide
  modified_base 2: mod_base = OTHER; note = bicyclic nucleic acid (BNA)
  modified_base 13: mod_base = OTHER; note = bicyclic nucleic acid (BNA)
  modified_base 18: mod_base = OTHER; note = bicyclic nucleic acid (BNA)
  modified_base 9: mod_base = OTHER; note = 5-methyl
  modified_base 13..14: mod_base = OTHER; note = 5-methyl
  modified_base 18: mod_base = OTHER; note = 5-methyl
  source 1..18: mol_type = other RNA
ggtaagttctgtccaagc

SEQ ID NO: 12457 - RNA, 18 nt, synthetic construct
  misc_feature 1..18: note = Description of Artificial Sequence: Synthetic Antisense oligonucleotide
  modified_base 9: mod_base = OTHER; note = 5-methyl
  modified_base 13..14: mod_base = OTHER; note = 5-methyl
  modified_base 18: mod_base = OTHER; note = 5-methyl
  modified_base 9: mod_base = OTHER; note = bicyclic nucleic acid (BNA)
  modified_base 13: mod_base = OTHER; note = bicyclic nucleic acid (BNA)
  modified_base 18: mod_base = OTHER; note = bicyclic nucleic acid (BNA)
  source 1..18: mol_type = other RNA
ggtaagttctgtccaagc

SEQ ID NO: 12458 - RNA, 18 nt, synthetic construct
  misc_feature 1..18: note = Description of Artificial Sequence: Synthetic Antisense oligonucleotide
  modified_base 9: mod_base = OTHER; note = 5-methyl
  modified_base 13..14: mod_base = OTHER; note = 5-methyl
  modified_base 18: mod_base = OTHER; note = 5-methyl
  modified_base 13..14: mod_base = OTHER; note = bicyclic nucleic acid (BNA)
  modified_base 18: mod_base = OTHER; note = bicyclic nucleic acid (BNA)
  source 1..18: mol_type = other RNA
ggtaagttctgtccaagc

SEQ ID NO: 12459 - RNA, 18 nt, synthetic construct
  misc_feature 1..18: note = Description of Artificial Sequence: Synthetic Antisense oligonucleotide
  modified_base 2: mod_base = OTHER; note = bicyclic nucleic acid (BNA)
  modified_base 14: mod_base = OTHER; note = bicyclic nucleic acid (BNA)
  modified_base 18: mod_base = OTHER; note = bicyclic nucleic acid (BNA)
  modified_base 9: mod_base = OTHER; note = 5-methyl
  modified_base 13..14: mod_base = OTHER; note = 5-methyl
  modified_base 18: mod_base = OTHER; note = 5-methyl
  source 1..18: mol_type = other RNA
ggtaagttctgtccaagc

SEQ ID NO: 12460 - RNA, 18 nt, synthetic construct
  misc_feature 1..18: note = Description of Artificial Sequence: Synthetic Antisense oligonucleotide
  modified_base 9: mod_base = OTHER; note = 5-methyl
  modified_base 13..14: mod_base = OTHER; note = 5-methyl
  modified_base 18: mod_base = OTHER; note = 5-methyl
  modified_base 11: mod_base = OTHER; note = bicyclic nucleic acid (BNA)
  modified_base 14: mod_base = OTHER; note = bicyclic nucleic acid (BNA)
  modified_base 18: mod_base = OTHER; note = bicyclic nucleic acid (BNA)
  source 1..18: mol_type = other RNA
ggtaagttctgtccaagc

SEQ ID NO: 12461 - RNA, 18 nt, synthetic construct
  misc_feature 1..18: note = Description of Artificial Sequence: Synthetic Antisense oligonucleotide
  modified_base 6: mod_base = OTHER; note = bicyclic nucleic acid (BNA)
  modified_base 13: mod_base = OTHER; note = bicyclic nucleic acid (BNA)
  modified_base 18: mod_base = OTHER; note = bicyclic nucleic acid (BNA)
  modified_base 9: mod_base = OTHER; note = 5-methyl
  modified_base 13..14: mod_base = OTHER; note = 5-methyl
  modified_base 18: mod_base = OTHER; note = 5-methyl
  source 1..18: mol_type = other RNA
ggtaagttctgtccaagc

SEQ ID NO: 12462 - RNA, 18 nt, synthetic construct
  misc_feature 1..18: note = Description of Artificial Sequence: Synthetic Antisense oligonucleotide
  modified_base 6: mod_base = OTHER; note = bicyclic nucleic acid (BNA)
  modified_base 14: mod_base = OTHER; note = bicyclic nucleic acid (BNA)
  modified_base 18: mod_base = OTHER; note = bicyclic nucleic acid (BNA)
  modified_base 9: mod_base = OTHER; note = 5-methyl
  modified_base 13..14: mod_base = OTHER; note = 5-methyl
  modified_base 18: mod_base = OTHER; note = 5-methyl
  source 1..18: mol_type = other RNA
ggtaagttctgtccaagc

SEQ ID NO: 12463 - RNA, 18 nt, synthetic construct
  misc_feature 1..18: note = Description of Artificial Sequence: Synthetic Antisense oligonucleotide
  modified_base 9: mod_base = OTHER; note = 5-methyl
  modified_base 13..14: mod_base = OTHER; note = 5-methyl
  modified_base 18: mod_base = OTHER; note = 5-methyl
  modified_base 9: mod_base = OTHER; note = bicyclic nucleic acid (BNA)
  modified_base 11: mod_base = OTHER; note = bicyclic nucleic acid (BNA)
  modified_base 18: mod_base = OTHER; note = bicyclic nucleic acid (BNA)
  source 1..18: mol_type = other RNA
ggtaagttctgtccaagc

SEQ ID NO: 12464 - RNA, 18 nt, synthetic construct
  misc_feature 1..18: note = Description of Artificial Sequence: Synthetic Antisense oligonucleotide
  modified_base 9: mod_base = OTHER; note = 5-methyl
  modified_base 13..14: mod_base = OTHER; note = 5-methyl
  modified_base 18: mod_base = OTHER; note = 5-methyl
  modified_base 11: mod_base = OTHER; note = bicyclic nucleic acid (BNA)
  modified_base 13: mod_base = OTHER; note = bicyclic nucleic acid (BNA)
  modified_base 18: mod_base = OTHER; note = bicyclic nucleic acid (BNA)
  source 1..18: mol_type = other RNA
ggtaagttctgtccaagc

SEQ ID NO: 12465 - RNA, 18 nt, synthetic construct
  misc_feature 1..18: note = Description of Artificial Sequence: Synthetic Antisense oligonucleotide
  modified_base 2: mod_base = OTHER; note = bicyclic nucleic acid (BNA)
  modified_base 6: mod_base = OTHER; note = bicyclic nucleic acid (BNA)
  modified_base 18: mod_base = OTHER; note = bicyclic nucleic acid (BNA)
  modified_base 9: mod_base = OTHER; note = 5-methyl
  modified_base 13..14: mod_base = OTHER; note = 5-methyl
  modified_base 18: mod_base = OTHER; note = 5-methyl
  source 1..18: mol_type = other RNA
ggtaagttctgtccaagc

SEQ ID NO: 12466 - RNA, 18 nt, synthetic construct
  misc_feature 1..18: note = Description of Artificial Sequence: Synthetic Antisense oligonucleotide
  modified_base 2: mod_base = OTHER; note = bicyclic nucleic acid (BNA)
  modified_base 9: mod_base = OTHER; note = bicyclic nucleic acid (BNA)
  modified_base 18: mod_base = OTHER; note = bicyclic nucleic acid (BNA)
  modified_base 9: mod_base = OTHER; note = 5-methyl
  modified_base 13..14: mod_base = OTHER; note = 5-methyl
  modified_base 18: mod_base = OTHER; note = 5-methyl
  source 1..18: mol_type = other RNA
ggtaagttctgtccaagc

SEQ ID NO: 12467 - RNA, 18 nt, synthetic construct
  misc_feature 1..18: note = Description of Artificial Sequence: Synthetic Antisense oligonucleotide
  modified_base 2: mod_base = OTHER; note = bicyclic nucleic acid (BNA)
  modified_base 11: mod_base = OTHER; note = bicyclic nucleic acid (BNA)
  modified_base 18: mod_base = OTHER; note = bicyclic nucleic acid (BNA)
  modified_base 9: mod_base = OTHER; note = 5-methyl
  modified_base 13..14: mod_base = OTHER; note = 5-methyl
  modified_base 18: mod_base = OTHER; note = 5-methyl
  source 1..18: mol_type = other RNA
ggtaagttctgtccaagc

SEQ ID NO: 12468 - RNA, 18 nt, synthetic construct
  misc_feature 1..18: note = Description of Artificial Sequence: Synthetic Antisense oligonucleotide
  modified_base 6: mod_base = OTHER; note = bicyclic nucleic acid (BNA)
  modified_base 9: mod_base = OTHER; note = bicyclic nucleic acid (BNA)
  modified_base 18: mod_base = OTHER; note = bicyclic nucleic acid (BNA)
  modified_base 9: mod_base = OTHER; note = 5-methyl
  modified_base 13..14: mod_base = OTHER; note = 5-methyl
  modified_base 18: mod_base = OTHER; note = 5-methyl
  source 1..18: mol_type = other RNA
ggtaagttctgtccaagc

SEQ ID NO: 12469 - RNA, 18 nt, synthetic construct
  misc_feature 1..18: note = Description of Artificial Sequence: Synthetic Antisense oligonucleotide
  modified_base 5: mod_base = OTHER; note = bicyclic nucleic acid (BNA)
  modified_base 8: mod_base = OTHER; note = bicyclic nucleic acid (BNA)
  modified_base 18: mod_base = OTHER; note = bicyclic nucleic acid (BNA)
  modified_base 8: mod_base = OTHER; note = 5-methyl
  modified_base 12..13: mod_base = OTHER; note = 5-methyl
  modified_base 17..18: mod_base = OTHER; note = 5-methyl
  source 1..18: mol_type = other RNA
gtaagttctgtccaagcc

SEQ ID NO: 12470 - RNA, 18 nt, synthetic construct
  misc_feature 1..18: note = Description of Artificial Sequence: Synthetic Antisense oligonucleotide
  modified_base 8: mod_base = OTHER; note = 5-methyl
  modified_base 12..13: mod_base = OTHER; note = 5-methyl
  modified_base 17..18: mod_base = OTHER; note = 5-methyl
  modified_base 13: mod_base = OTHER; note = bicyclic nucleic acid (BNA)
  modified_base 16: mod_base = OTHER; note = bicyclic nucleic acid (BNA)
  modified_base 18: mod_base = OTHER; note = bicyclic nucleic acid (BNA)
  source 1..18: mol_type = other RNA
gtaagttctgtccaagcc

SEQ ID NO: 12471 - RNA, 18 nt, synthetic construct
  misc_feature 1..18: note = Description of Artificial Sequence: Synthetic Antisense oligonucleotide
  modified_base 5: mod_base = OTHER; note = bicyclic nucleic acid (BNA)
  modified_base 10: mod_base = OTHER; note = bicyclic nucleic acid (BNA)
  modified_base 18: mod_base = OTHER; note = bicyclic nucleic acid (BNA)
  modified_base 8: mod_base = OTHER; note = 5-methyl
  modified_base 12..13: mod_base = OTHER; note = 5-methyl
  modified_base 17..18: mod_base = OTHER; note = 5-methyl
  source 1..18: mol_type = other RNA
gtaagttctgtccaagcc

SEQ ID NO: 12472 - RNA, 18 nt, synthetic construct
  misc_feature 1..18: note = Description of Artificial Sequence: Synthetic Antisense oligonucleotide
  modified_base 8: mod_base = OTHER; note = 5-methyl
  modified_base 12..13: mod_base = OTHER; note = 5-methyl
  modified_base 17..18: mod_base = OTHER; note = 5-methyl
  modified_base 8: mod_base = OTHER; note = bicyclic nucleic acid (BNA)
  modified_base 16: mod_base = OTHER; note = bicyclic nucleic acid (BNA)
  modified_base 18: mod_base = OTHER; note = bicyclic nucleic acid (BNA)
  source 1..18: mol_type = other RNA
gtaagttctgtccaagcc

SEQ ID NO: 12473 - RNA, 18 nt, synthetic construct
  misc_feature 1..18: note = Description of Artificial Sequence: Synthetic Antisense oligonucleotide
  modified_base 8: mod_base = OTHER; note = 5-methyl
  modified_base 12..13: mod_base = OTHER; note = 5-methyl
  modified_base 17..18: mod_base = OTHER; note = 5-methyl
  modified_base 10: mod_base = OTHER; note = bicyclic nucleic acid (BNA)
  modified_base 16: mod_base = OTHER; note = bicyclic nucleic acid (BNA)
  modified_base 18: mod_base = OTHER; note = bicyclic nucleic acid (BNA)
  source 1..18: mol_type = other RNA
gtaagttctgtccaagcc

SEQ ID NO: 12474 - RNA, 18 nt, synthetic construct
  misc_feature 1..18: note = Description of Artificial Sequence: Synthetic Antisense oligonucleotide
  modified_base 8: mod_base = OTHER; note = 5-methyl
  modified_base 12..13: mod_base = OTHER; note = 5-methyl
  modified_base 17..18: mod_base = OTHER; note = 5-methyl
  modified_base 8: mod_base = OTHER; note = bicyclic nucleic acid (BNA)
  modified_base 13: mod_base = OTHER; note = bicyclic nucleic acid (BNA)
  modified_base 18: mod_base = OTHER; note = bicyclic nucleic acid (BNA)
  source 1..18: mol_type = other RNA
gtaagttctgtccaagcc

SEQ ID NO: 12475 - RNA, 18 nt, synthetic construct
  misc_feature 1..18: note = Description of Artificial Sequence: Synthetic Antisense oligonucleotide
  modified_base 5: mod_base = OTHER; note = bicyclic nucleic acid (BNA)
  modified_base 16: mod_base = OTHER; note = bicyclic nucleic acid (BNA)
  modified_base 18: mod_base = OTHER; note = bicyclic nucleic acid (BNA)
  modified_base 8: mod_base = OTHER; note = 5-methyl
  modified_base 12..13: mod_base = OTHER; note = 5-methyl
  modified_base 17..18: mod_base = OTHER; note = 5-methyl
  source 1..18: mol_type = other RNA
gtaagttctgtccaagcc

SEQ ID NO: 12476 - RNA, 18 nt, synthetic construct
  misc_feature 1..18: note = Description of Artificial Sequence: Synthetic Antisense oligonucleotide
  modified_base 8: mod_base = OTHER; note = 5-methyl
  modified_base 12..13: mod_base = OTHER; note = 5-methyl
  modified_base 17..18: mod_base = OTHER; note = 5-methyl
  modified_base 10: mod_base = OTHER; note = bicyclic nucleic acid (BNA)
  modified_base 13: mod_base = OTHER; note = bicyclic nucleic acid (BNA)
  modified_base 18: mod_base = OTHER; note = bicyclic nucleic acid (BNA)
  source 1..18: mol_type = other RNA
gtaagttctgtccaagcc

SEQ ID NO: 12477 - RNA, 18 nt, synthetic construct
  misc_feature 1..18: note = Description of Artificial Sequence: Synthetic Antisense oligonucleotide
  modified_base 5: mod_base = OTHER; note = bicyclic nucleic acid (BNA)
  modified_base 13: mod_base = OTHER; note = bicyclic nucleic acid (BNA)
  modified_base 18: mod_base = OTHER; note = bicyclic nucleic acid (BNA)
  modified_base 8: mod_base = OTHER; note = 5-methyl
  modified_base 12..13: mod_base = OTHER; note = 5-methyl
  modified_base 17..18: mod_base = OTHER; note = 5-methyl
  source 1..18: mol_type = other RNA
gtaagttctgtccaagcc

SEQ ID NO: 12478 - RNA, 18 nt, synthetic construct
  misc_feature 1..18: note = Description of Artificial Sequence: Synthetic Antisense oligonucleotide
  modified_base 8: mod_base = OTHER; note = 5-methyl
  modified_base 12..13: mod_base = OTHER; note = 5-methyl
  modified_base 17..18: mod_base = OTHER; note = 5-methyl
  modified_base 10: mod_base = OTHER; note = bicyclic nucleic acid (BNA)
  modified_base 12: mod_base = OTHER; note = bicyclic nucleic acid (BNA)
  modified_base 18: mod_base = OTHER; note = bicyclic nucleic acid (BNA)
  source 1..18: mol_type = other RNA
gtaagttctgtccaagcc

SEQ ID NO: 12479 - RNA, 18 nt, synthetic construct
  misc_feature 1..18: note = Description of Artificial Sequence: Synthetic Antisense oligonucleotide
  modified_base 8: mod_base = OTHER; note = 5-methyl
  modified_base 12..13: mod_base = OTHER; note = 5-methyl
  modified_base 17..18: mod_base = OTHER; note = 5-methyl
  modified_base 8: mod_base = OTHER; note = bicyclic nucleic acid (BNA)
  modified_base 12: mod_base = OTHER; note = bicyclic nucleic acid (BNA)
  modified_base 18: mod_base = OTHER; note = bicyclic nucleic acid (BNA)
  source 1..18: mol_type = other RNA
gtaagttctgtccaagcc

SEQ ID NO: 12480 - RNA, 18 nt, synthetic construct
  misc_feature 1..18: note = Description of Artificial Sequence: Synthetic Antisense oligonucleotide
  modified_base 8: mod_base = OTHER; note = 5-methyl
  modified_base 12..13: mod_base = OTHER; note = 5-methyl
  modified_base 17..18: mod_base = OTHER; note = 5-methyl
  modified_base 12: mod_base = OTHER; note = bicyclic nucleic acid (BNA)
  modified_base 16: mod_base = OTHER; note = bicyclic nucleic acid (BNA)
  modified_base 18: mod_base = OTHER; note = bicyclic nucleic acid (BNA)
  source 1..18: mol_type = other RNA
gtaagttctgtccaagcc

SEQ ID NO: 12481 - RNA, 18 nt, synthetic construct
  misc_feature 1..18: note = Description of Artificial Sequence: Synthetic Antisense oligonucleotide
  modified_base 8: mod_base = OTHER; note = 5-methyl
  modified_base 12..13: mod_base = OTHER; note = 5-methyl
  modified_base 17..18: mod_base = OTHER; note = 5-methyl
  modified_base 12..13: mod_base = OTHER; note = bicyclic nucleic acid (BNA)
  modified_base 18: mod_base = OTHER; note = bicyclic nucleic acid (BNA)
  source 1..18: mol_type = other RNA
gtaagttctgtccaagcc

SEQ ID NO: 12482 - RNA, 18 nt, synthetic construct
  misc_feature 1..18: note = Description of Artificial Sequence: Synthetic Antisense oligonucleotide
  modified_base 5: mod_base = OTHER; note = bicyclic nucleic acid (BNA)
  modified_base 12: mod_base = OTHER; note = bicyclic nucleic acid (BNA)
  modified_base 18: mod_base = OTHER; note = bicyclic nucleic acid (BNA)
  modified_base 8: mod_base = OTHER; note = 5-methyl
  modified_base 12..13: mod_base = OTHER; note = 5-methyl
  modified_base 17..18: mod_base = OTHER; note = 5-methyl
  source 1..18: mol_type = other RNA
gtaagttctgtccaagcc

SEQ ID NO: 12483 - RNA, 18 nt, synthetic construct
  misc_feature 1..18: note = Description of Artificial Sequence: Synthetic Antisense oligonucleotide
  modified_base 8: mod_base = OTHER; note = 5-methyl
  modified_base 12..13: mod_base = OTHER; note = 5-methyl
  modified_base 17..18: mod_base = OTHER; note = 5-methyl
  modified_base 8: mod_base = OTHER; note = bicyclic nucleic acid (BNA)
  modified_base 10: mod_base = OTHER; note = bicyclic nucleic acid (BNA)
  modified_base 18: mod_base = OTHER; note = bicyclic nucleic acid (BNA)
  source 1..18: mol_type = other RNA
gtaagttctgtccaagcc

SEQ ID NO: 12484 - RNA, 18 nt, synthetic construct
  misc_feature 1..18: note = Description of Artificial Sequence: Synthetic Antisense oligonucleotide
  modified_base 4: mod_base = OTHER; note = 5-methyl
  modified_base 13: mod_base = OTHER; note = 5-methyl
  modified_base 17..18: mod_base = OTHER; note = 5-methyl
  modified_base 6: mod_base = OTHER; note = bicyclic nucleic acid (BNA)
  modified_base 10: mod_base = OTHER; note = bicyclic nucleic acid (BNA)
  modified_base 18: mod_base = OTHER; note = bicyclic nucleic acid (BNA)
  source 1..18: mol_type = other RNA
agtcggtaagttctgtcc

SEQ ID NO: 12485 - RNA, 18 nt, synthetic construct
  misc_feature 1..18: note = Description of Artificial Sequence: Synthetic Antisense oligonucleotide
  modified_base 2: mod_base = OTHER; note = bicyclic nucleic acid (BNA)
  modified_base 4: mod_base = OTHER; note = bicyclic nucleic acid (BNA)
  modified_base 18: mod_base = OTHER; note = bicyclic nucleic acid (BNA)
  modified_base 4: mod_base = OTHER; note = 5-methyl
  modified_base 13: mod_base = OTHER; note = 5-methyl
  modified_base 17..18: mod_base = OTHER; note = 5-methyl
  source 1..18: mol_type = other RNA
agtcggtaagttctgtcc

SEQ ID NO: 12486 - RNA, 18 nt, synthetic construct
  misc_feature 1..18: note = Description of Artificial Sequence: Synthetic Antisense oligonucleotide
  modified_base 4: mod_base = OTHER; note = 5-methyl
  modified_base 13: mod_base = OTHER; note = 5-methyl
  modified_base 17..18: mod_base = OTHER; note = 5-methyl
  modified_base 5: mod_base = OTHER; note = bicyclic nucleic acid (BNA)
  modified_base 13: mod_base = OTHER; note = bicyclic nucleic acid (BNA)
  modified_base 18: mod_base = OTHER; note = bicyclic nucleic acid (BNA)
  source 1..18: mol_type = other RNA
agtcggtaagttctgtcc

SEQ ID NO: 12487 - RNA, 18 nt, synthetic construct
  misc_feature 1..18: note = Description of Artificial Sequence: Synthetic Antisense oligonucleotide
  modified_base 4: mod_base = OTHER; note = 5-methyl
  modified_base 13: mod_base = OTHER; note = 5-methyl
  modified_base 17..18: mod_base = OTHER; note = 5-methyl
  modified_base 4: mod_base = OTHER; note = bicyclic nucleic acid (BNA)
  modified_base 15: mod_base = OTHER; note = bicyclic nucleic acid (BNA)
  modified_base 18: mod_base = OTHER; note = bicyclic nucleic acid (BNA)
  source 1..18: mol_type = other RNA
agtcggtaagttctgtcc

SEQ ID NO: 12488 - RNA, 18 nt, synthetic construct
  misc_feature 1..18: note = Description of Artificial Sequence: Synthetic Antisense oligonucleotide
  modified_base 4: mod_base = OTHER; note = 5-methyl
  modified_base 13: mod_base = OTHER; note = 5-methyl
  modified_base 17..18: mod_base = OTHER; note = 5-methyl
  modified_base 5: mod_base = OTHER; note = bicyclic nucleic acid (BNA)
  modified_base 10: mod_base = OTHER; note = bicyclic nucleic acid (BNA)
  modified_base 18: mod_base = OTHER; note = bicyclic nucleic acid (BNA)
  source 1..18: mol_type = other RNA
agtcggtaagttctgtcc

SEQ ID NO: 12489 - RNA, 18 nt, synthetic construct
  misc_feature 1..18: note = Description of Artificial Sequence: Synthetic Antisense oligonucleotide
  modified_base 4: mod_base = OTHER; note = 5-methyl
  modified_base 13: mod_base = OTHER; note = 5-methyl
  modified_base 17..18: mod_base = OTHER; note = 5-methyl
  modified_base 6: mod_base = OTHER; note = bicyclic nucleic acid (BNA)
  modified_base 13: mod_base = OTHER; note = bicyclic nucleic acid (BNA)
  modified_base 18: mod_base = OTHER; note = bicyclic nucleic acid (BNA)
  source 1..18: mol_type = other RNA
agtcggtaagttctgtcc

SEQ ID NO: 12490 - RNA, 18 nt, synthetic construct
  misc_feature 1..18: note = Description of Artificial Sequence: Synthetic Antisense oligonucleotide
  modified_base 2: mod_base = OTHER; note = bicyclic nucleic acid (BNA)
  modified_base 15: mod_base = OTHER; note = bicyclic nucleic acid (BNA)
  modified_base 18: mod_base = OTHER; note = bicyclic nucleic acid (BNA)
  modified_base 4: mod_base = OTHER; note = 5-methyl
  modified_base 13: mod_base = OTHER; note = 5-methyl
  modified_base 17..18: mod_base = OTHER; note = 5-methyl
  source 1..18: mol_type = other RNA
agtcggtaagttctgtcc

SEQ ID NO: 12491 - RNA, 18 nt, synthetic construct
  misc_feature 1..18: note = Description of Artificial Sequence: Synthetic Antisense oligonucleotide
  modified_base 2: mod_base = OTHER; note = bicyclic nucleic acid (BNA)
  modified_base 6: mod_base = OTHER; note = bicyclic nucleic acid (BNA)
  modified_base 18: mod_base = OTHER; note = bicyclic nucleic acid (BNA)
  modified_base 4: mod_base = OTHER; note = 5-methyl
  modified_base 13: mod_base = OTHER; note = 5-methyl
  modified_base 17..18: mod_base = OTHER; note = 5-methyl
  source 1..18: mol_type = other RNA
agtcggtaagttctgtcc

SEQ ID NO: 12492 - RNA, 18 nt, synthetic construct
  misc_feature 1..18: note = Description of Artificial Sequence: Synthetic Antisense oligonucleotide
  modified_base 4: mod_base = OTHER; note = 5-methyl
  modified_base 13: mod_base = OTHER; note = 5-methyl
  modified_base 17..18: mod_base = OTHER; note = 5-methyl
  modified_base 10: mod_base = OTHER; note = bicyclic nucleic acid (BNA)
  modified_base 15: mod_base = OTHER; note = bicyclic nucleic acid (BNA)
  modified_base 18: mod_base = OTHER; note = bicyclic nucleic acid (BNA)
  source 1..18: mol_type = other RNA
agtcggtaagttctgtcc

SEQ ID NO: 12493 - RNA, 18 nt, synthetic construct
  misc_feature 1..18: note = Description of Artificial Sequence: Synthetic Antisense oligonucleotide
  modified_base 4: mod_base = OTHER; note = 5-methyl
  modified_base 13: mod_base = OTHER; note = 5-methyl
  modified_base 17..18: mod_base = OTHER; note = 5-methyl
  modified_base 13: mod_base = OTHER; note = bicyclic nucleic acid (BNA)
  modified_base 15: mod_base = OTHER; note = bicyclic nucleic acid (BNA)
  modified_base 18: mod_base = OTHER; note = bicyclic nucleic acid (BNA)
  source 1..18: mol_type = other RNA
agtcggtaagttctgtcc

SEQ ID NO: 12494 - RNA, 18 nt, synthetic construct
  misc_feature 1..18: note = Description of Artificial Sequence: Synthetic Antisense oligonucleotide
  modified_base 4: mod_base = OTHER; note = 5-methyl
  modified_base 13: mod_base = OTHER; note = 5-methyl
  modified_base 17..18: mod_base = OTHER; note = 5-methyl
  modified_base 5..6: mod_base = OTHER; note = bicyclic nucleic acid (BNA)
  modified_base 18: mod_base = OTHER; note = bicyclic nucleic acid (BNA)
  source 1..18: mol_type = other RNA
agtcggtaagttctgtcc

SEQ ID NO: 12495 - RNA, 18 nt, synthetic construct
  misc_feature 1..18: note = Description of Artificial Sequence: Synthetic Antisense oligonucleotide
  modified_base 4: mod_base = OTHER; note = 5-methyl
  modified_base 13: mod_base = OTHER; note = 5-methyl
  modified_base 17..18: mod_base = OTHER; note = 5-methyl
  modified_base 5: mod_base = OTHER; note = bicyclic nucleic acid (BNA)
  modified_base 15: mod_base = OTHER; note = bicyclic nucleic acid (BNA)
  modified_base 18: mod_base = OTHER; note = bicyclic nucleic acid (BNA)
  source 1..18: mol_type = other RNA
agtcggtaagttctgtcc

SEQ ID NO: 12496 - RNA, 18 nt, synthetic construct
  misc_feature 1..18: note = Description of Artificial Sequence: Synthetic Antisense oligonucleotide
  modified_base 2: mod_base = OTHER; note = bicyclic nucleic acid (BNA)
  modified_base 5: mod_base = OTHER; note = bicyclic nucleic acid (BNA)
  modified_base 18: mod_base = OTHER; note = bicyclic nucleic acid (BNA)
  modified_base 4: mod_base = OTHER; note = 5-methyl
  modified_base 13: mod_base = OTHER; note = 5-methyl
  modified_base 17..18: mod_base = OTHER; note = 5-methyl
  source 1..18: mol_type = other RNA
agtcggtaagttctgtcc

SEQ ID NO: 12497 - RNA, 18 nt, synthetic construct
  misc_feature 1..18: note = Description of Artificial Sequence: Synthetic Antisense oligonucleotide
  modified_base 4: mod_base = OTHER; note = 5-methyl
  modified_base 13: mod_base = OTHER; note = 5-methyl
  modified_base 17..18: mod_base = OTHER; note = 5-methyl
  modified_base 4: mod_base = OTHER; note = bicyclic nucleic acid (BNA)
  modified_base 10: mod_base = OTHER; note = bicyclic nucleic acid (BNA)
  modified_base 18: mod_base = OTHER; note = bicyclic nucleic acid (BNA)
  source 1..18: mol_type = other RNA
agtcggtaagttctgtcc

SEQ ID NO: 12498 - RNA, 18 nt, synthetic construct
  misc_feature 1..18: note = Description of Artificial Sequence: Synthetic Antisense oligonucleotide
  modified_base 2: mod_base = OTHER; note = bicyclic nucleic acid (BNA)
  modified_base 10: mod_base = OTHER; note = bicyclic nucleic acid (BNA)
  modified_base 18: mod_base = OTHER; note = bicyclic nucleic acid (BNA)
  modified_base 4: mod_base = OTHER; note = 5-methyl
  modified_base 13: mod_base = OTHER; note = 5-methyl
  modified_base 17..18: mod_base = OTHER; note = 5-methyl
  source 1..18: mol_type = other RNA
agtcggtaagttctgtcc

SEQ ID NO: 12499 - RNA, 18 nt, synthetic construct
  misc_feature 1..18: note = Description of Artificial Sequence: Synthetic Antisense oligonucleotide
  modified_base 4: mod_base = OTHER; note = 5-methyl
  modified_base 13: mod_base = OTHER; note = 5-methyl
  modified_base 17..18: mod_base = OTHER; note = 5-methyl
  modified_base 4: mod_base = OTHER; note = bicyclic nucleic acid (BNA)
  modified_base 6: mod_base = OTHER; note = bicyclic nucleic acid (BNA)
  modified_base 18: mod_base = OTHER; note = bicyclic nucleic acid (BNA)
  source 1..18: mol_type = other RNA
agtcggtaagttctgtcc

SEQ ID NO: 12500 - RNA, 18 nt, synthetic construct
  misc_feature 1..18: note = Description of Artificial Sequence: Synthetic Antisense oligonucleotide
  modified_base 4: mod_base = OTHER; note = 5-methyl
  modified_base 13: mod_base = OTHER; note = 5-methyl
  modified_base 17..18: mod_base = OTHER; note = 5-methyl
  modified_base 4: mod_base = OTHER; note = bicyclic nucleic acid (BNA)
  modified_base 13: mod_base = OTHER; note = bicyclic nucleic acid (BNA)
  modified_base 18: mod_base = OTHER; note = bicyclic nucleic acid (BNA)
  source 1..18: mol_type = other RNA
agtcggtaagttctgtcc

SEQ ID NO: 12501 - RNA, 18 nt, synthetic construct
  misc_feature 1..18: note = Description of Artificial Sequence: Synthetic Antisense oligonucleotide
  modified_base 2: mod_base = OTHER; note = bicyclic nucleic acid (BNA)
  modified_base 13: mod_base = OTHER; note = bicyclic nucleic acid (BNA)
  modified_base 18: mod_base = OTHER; note = bicyclic nucleic acid (BNA)
  modified_base 4: mod_base = OTHER; note = 5-methyl
  modified_base 13: mod_base = OTHER; note = 5-methyl
  modified_base 17..18: mod_base = OTHER; note = 5-methyl
  source 1..18: mol_type = other RNA
agtcggtaagttctgtcc

SEQ ID NO: 12502 - RNA, 18 nt, synthetic construct
  misc_feature 1..18: note = Description of Artificial Sequence: Synthetic Antisense oligonucleotide
  modified_base 4: mod_base = OTHER; note = 5-methyl
  modified_base 13: mod_base = OTHER; note = 5-methyl
  modified_base 17..18: mod_base = OTHER; note = 5-methyl
  modified_base 6: mod_base = OTHER; note = bicyclic nucleic acid (BNA)
  modified_base 15: mod_base = OTHER; note = bicyclic nucleic acid (BNA)
  modified_base 18: mod_base = OTHER; note = bicyclic nucleic acid (BNA)
  source 1..18: mol_type = other RNA
agtcggtaagttctgtcc

SEQ ID NO: 12503 - RNA, 18 nt, synthetic construct
  misc_feature 1..18: note = Description of Artificial Sequence: Synthetic Antisense oligonucleotide
  modified_base 4: mod_base = OTHER; note = 5-methyl
  modified_base 13: mod_base = OTHER; note = 5-methyl
  modified_base 17..18: mod_base = OTHER; note = 5-methyl
  modified_base 4..5: mod_base = OTHER; note = bicyclic nucleic acid (BNA)
  modified_base 18: mod_base = OTHER; note = bicyclic nucleic acid (BNA)
  source 1..18: mol_type = other RNA
agtcggtaagttctgtcc

SEQ ID NO: 12504 - RNA, 18 nt, synthetic construct
  misc_feature 1..18: note = Description of Artificial Sequence: Synthetic Antisense oligonucleotide
  modified_base 4: mod_base = OTHER; note = 5-methyl
  modified_base 13: mod_base = OTHER; note = 5-methyl
  modified_base 17..18: mod_base = OTHER; note = 5-methyl
  modified_base 10: mod_base = OTHER; note = bicyclic nucleic acid (BNA)
  modified_base 13: mod_base = OTHER; note = bicyclic nucleic acid (BNA)
  modified_base 18: mod_base = OTHER; note = bicyclic nucleic acid (BNA)
  source 1..18: mol_type = other RNA
agtcggtaagttctgtcc

SEQ ID NO: 12505 - RNA, 18 nt, synthetic construct
  misc_feature 1..18: note = Description of Artificial Sequence: Synthetic Antisense oligonucleotide
  modified_base 1: mod_base = OTHER; note = 5-methyl
  modified_base 5..6: mod_base = OTHER; note = 5-methyl
  modified_base 10..12: mod_base = OTHER; note = 5-methyl
  modified_base 6: mod_base = OTHER; note = bicyclic nucleic acid (BNA)
  modified_base 10: mod_base = OTHER; note = bicyclic nucleic acid (BNA)
  modified_base 18: mod_base = OTHER; note = bicyclic nucleic acid (BNA)
  source 1..18: mol_type = other RNA
ctgtccaagcccggttga

SEQ ID NO: 12506 - RNA, 18 nt, synthetic construct
  misc_feature 1..18: note = Description of Artificial Sequence: Synthetic Antisense oligonucleotide
  modified_base 1: mod_base = OTHER; note = 5-methyl
  modified_base 5..6: mod_base = OTHER; note = 5-methyl
  modified_base 10..12: mod_base = OTHER; note = 5-methyl
  modified_base 9: mod_base = OTHER; note = bicyclic nucleic acid (BNA)
  modified_base 14: mod_base = OTHER; note = bicyclic nucleic acid (BNA)
  modified_base 18: mod_base = OTHER; note = bicyclic nucleic acid (BNA)
  source 1..18: mol_type = other RNA
ctgtccaagcccggttga

SEQ ID NO: 12507 - RNA, 18 nt, synthetic construct
  misc_feature 1..18: note = Description of Artificial Sequence: Synthetic Antisense oligonucleotide
  modified_base 1: mod_base = OTHER; note = 5-methyl
  modified_base 5..6: mod_base = OTHER; note = 5-methyl
  modified_base 10..12: mod_base = OTHER; note = 5-methyl
  modified_base 11..12: mod_base = OTHER; note = bicyclic nucleic acid (BNA)
  modified_base 18: mod_base = OTHER; note = bicyclic nucleic acid (BNA)
  source 1..18: mol_type = other RNA
ctgtccaagcccggttga

SEQ ID NO: 12508 - RNA, 18 nt, synthetic construct
  misc_feature 1..18: note = Description of Artificial Sequence: Synthetic Antisense oligonucleotide
  modified_base 1: mod_base = OTHER; note = 5-methyl
  modified_base 5..6: mod_base = OTHER; note = 5-methyl
  modified_base 10..12: mod_base = OTHER; note = 5-methyl
  modified_base 5: mod_base = OTHER; note = bicyclic nucleic acid (BNA)
  modified_base 9: mod_base = OTHER; note = bicyclic nucleic acid (BNA)
  modified_base 18: mod_base = OTHER; note = bicyclic nucleic acid (BNA)
  source 1..18: mol_type = other RNA
ctgtccaagcccggttga

SEQ ID NO: 12509 - RNA, 18 nt, synthetic construct
  misc_feature 1..18: note = Description of Artificial Sequence: Synthetic Antisense oligonucleotide
  modified_base 1: mod_base = OTHER; note = 5-methyl
  modified_base 5..6: mod_base = OTHER; note = 5-methyl
  modified_base 10..12: mod_base = OTHER; note = 5-methyl
  modified_base 3: mod_base = OTHER; note = bicyclic nucleic acid (BNA)
  modified_base 9: mod_base = OTHER; note = bicyclic nucleic acid (BNA)
  modified_base 18: mod_base = OTHER; note = bicyclic nucleic acid (BNA)
  source 1..18: mol_type = other RNA
ctgtccaagcccggttga

SEQ ID NO: 12510 - RNA, 18 nt, synthetic construct
  misc_feature 1..18: note = Description of Artificial Sequence: Synthetic Antisense oligonucleotide
  modified_base 1: mod_base = OTHER; note = 5-methyl
  modified_base 5..6: mod_base = OTHER; note = 5-methyl
  modified_base 10..12: mod_base = OTHER; note = 5-methyl
  modified_base 6: mod_base = OTHER; note = bicyclic nucleic acid (BNA)
  modified_base 14: mod_base = OTHER; note = bicyclic nucleic acid (BNA)
  modified_base 18: mod_base = OTHER; note = bicyclic nucleic acid (BNA)
  source 1..18: mol_type = other RNA
ctgtccaagcccggttga

SEQ ID NO: 12511 - RNA, 18 nt, synthetic construct
  misc_feature 1..18: note = Description of Artificial Sequence: Synthetic Antisense oligonucleotide
  modified_base 1: mod_base = OTHER; note = 5-methyl
  modified_base 5..6: mod_base = OTHER; note = 5-methyl
  modified_base 10..12: mod_base = OTHER; note = 5-methyl
  modified_base 9..10: mod_base = OTHER; note = bicyclic nucleic acid (BNA)
  modified_base 18: mod_base = OTHER; note = bicyclic nucleic acid (BNA)
  source 1..18: mol_type = other RNA
ctgtccaagcccggttga

SEQ ID NO: 12512 - RNA, 18 nt, synthetic construct
  misc_feature 1..18: note = Description of Artificial Sequence: Synthetic Antisense oligonucleotide
  modified_base 1: mod_base = OTHER; note = 5-methyl
  modified_base 5..6: mod_base = OTHER; note = 5-methyl
  modified_base 10..12: mod_base = OTHER; note = 5-methyl
  modified_base 5: mod_base = OTHER; note = bicyclic nucleic acid (BNA)
  modified_base 13: mod_base = OTHER; note = bicyclic nucleic acid (BNA)
  modified_base 18: mod_base = OTHER; note = bicyclic nucleic acid (BNA)
  source 1..18: mol_type = other RNA
ctgtccaagcccggttga

SEQ ID NO: 12513 - RNA, 18 nt, synthetic construct
  misc_feature 1..18: note = Description of Artificial Sequence: Synthetic Antisense oligonucleotide
  modified_base 1: mod_base = OTHER; note = 5-methyl
  modified_base 5..6: mod_base = OTHER; note = 5-methyl
  modified_base 10..12: mod_base = OTHER; note = 5-methyl
  modified_base 3: mod_base = OTHER; note = bicyclic nucleic acid (BNA)
  modified_base 13: mod_base = OTHER; note = bicyclic nucleic acid (BNA)
  modified_base 18: mod_base = OTHER; note = bicyclic nucleic acid (BNA)
  source 1..18: mol_type = other RNA
ctgtccaagcccggttga

SEQ ID NO: 12514 - RNA, 18 nt, synthetic construct
  misc_feature 1..18: note = Description of Artificial Sequence: Synthetic Antisense oligonucleotide
  modified_base 1: mod_base = OTHER; note = 5-methyl
  modified_base 5..6: mod_base = OTHER; note = 5-methyl
  modified_base 10..12: mod_base = OTHER; note = 5-methyl
  modified_base 3: mod_base = OTHER; note = bicyclic nucleic acid (BNA)
  modified_base 6: mod_base = OTHER; note = bicyclic nucleic acid (BNA)
  modified_base 18: mod_base = OTHER; note = bicyclic nucleic acid (BNA)
  source 1..18: mol_type = other RNA
ctgtccaagcccggttga

SEQ ID NO: 12515 - RNA, 18 nt, synthetic construct
  misc_feature 1..18: note = Description of Artificial Sequence: Synthetic Antisense oligonucleotide
  modified_base 1: mod_base = OTHER; note = 5-methyl
  modified_base 5..6: mod_base = OTHER; note = 5-methyl
  modified_base 10..12: mod_base = OTHER; note = 5-methyl
  modified_base 6: mod_base = OTHER; note = bicyclic nucleic acid (BNA)
  modified_base 9: mod_base = OTHER; note = bicyclic nucleic acid (BNA)
  modified_base 18: mod_base = OTHER; note = bicyclic nucleic acid (BNA)
  source 1..18: mol_type = other RNA
ctgtccaagcccggttga

SEQ ID NO: 12516 - RNA, 18 nt, synthetic construct
  misc_feature 1..18: note = Description of Artificial Sequence: Synthetic Antisense oligonucleotide
  modified_base 1: mod_base = OTHER; note = 5-methyl
  modified_base 5..6: mod_base = OTHER; note = 5-methyl
  modified_base 10..12: mod_base = OTHER; note = 5-methyl
  modified_base 5: mod_base = OTHER; note = bicyclic nucleic acid (BNA)
  modified_base 10: mod_base = OTHER; note = bicyclic nucleic acid (BNA)
  modified_base 18: mod_base = OTHER; note = bicyclic nucleic acid (BNA)
  source 1..18: mol_type = other RNA
ctgtccaagcccggttga

SEQ ID NO: 12517 - RNA, 18 nt, synthetic construct
  misc_feature 1..18: note = Description of Artificial Sequence: Synthetic Antisense oligonucleotide
  modified_base 1: mod_base = OTHER; note = 5-methyl
  modified_base 5..6: mod_base = OTHER; note = 5-methyl
  modified_base 10..12: mod_base = OTHER; note = 5-methyl
  modified_base 3: mod_base = OTHER; note = bicyclic nucleic acid (BNA)
  modified_base 10: mod_base = OTHER; note = bicyclic nucleic acid (BNA)
  modified_base 18: mod_base = OTHER; note = bicyclic nucleic acid (BNA)
  source 1..18: mol_type = other RNA
ctgtccaagcccggttga

SEQ ID NO: 12518 - RNA, 18 nt, synthetic construct
  misc_feature 1..18: note = Description of Artificial Sequence: Synthetic Antisense oligonucleotide
  modified_base 1: mod_base = OTHER; note = 5-methyl
  modified_base 5..6: mod_base = OTHER; note = 5-methyl
  modified_base 10..12: mod_base = OTHER; note = 5-methyl
  modified_base 13..14: mod_base = OTHER; note = bicyclic nucleic acid (BNA)
  modified_base 18: mod_base = OTHER; note = bicyclic nucleic acid (BNA)
  source 1..18: mol_type = other RNA
ctgtccaagcccggttga

SEQ ID NO: 12519 - RNA, 18 nt, synthetic construct
  misc_feature 1..18: note = Description of Artificial Sequence: Synthetic Antisense oligonucleotide
  modified_base 1: mod_base = OTHER; note = 5-methyl
  modified_base 5..6: mod_base = OTHER; note = 5-methyl
  modified_base 10..12: mod_base = OTHER; note = 5-methyl
  modified_base 6: mod_base = OTHER; note = bicyclic nucleic acid (BNA)
  modified_base 13: mod_base = OTHER; note = bicyclic nucleic acid (BNA)
  modified_base 18: mod_base = OTHER; note = bicyclic nucleic acid (BNA)
  source 1..18: mol_type = other RNA
ctgtccaagcccggttga

SEQ ID NO: 12520 - RNA, 18 nt, synthetic construct
  misc_feature 1..18: note = Description of Artificial Sequence: Synthetic Antisense oligonucleotide
  modified_base 1: mod_base = OTHER; note = 5-methyl
  modified_base 5..6: mod_base = OTHER; note = 5-methyl
  modified_base 10..12: mod_base = OTHER; note = 5-methyl
  modified_base 9: mod_base = OTHER; note = bicyclic nucleic acid (BNA)
  modified_base 11: mod_base = OTHER; note = bicyclic nucleic acid (BNA)
  modified_base 18: mod_base = OTHER; note = bicyclic nucleic acid (BNA)
  source 1..18: mol_type = other RNA
ctgtccaagcccggttga

SEQ ID NO: 12521 - RNA, 18 nt, synthetic construct
  misc_feature 1..18: note = Description of Artificial Sequence: Synthetic Antisense oligonucleotide
  modified_base 1: mod_base = OTHER; note = 5-methyl
  modified_base 5..6: mod_base = OTHER; note = 5-methyl
  modified_base 10..12: mod_base = OTHER; note = 5-methyl
  modified_base 11: mod_base = OTHER; note = bicyclic nucleic acid (BNA)
  modified_base 13: mod_base = OTHER; note = bicyclic nucleic acid (BNA)
  modified_base 18: mod_base = OTHER; note = bicyclic nucleic acid (BNA)
  source 1..18: mol_type = other RNA
ctgtccaagcccggttga

SEQ ID NO: 12522 - RNA, 18 nt, synthetic construct
  misc_feature 1..18: note = Description of Artificial Sequence: Synthetic Antisense oligonucleotide
  modified_base 1: mod_base = OTHER; note = 5-methyl
  modified_base 5..6: mod_base = OTHER; note = 5-methyl
  modified_base 10..12: mod_base = OTHER; note = 5-methyl
  modified_base 5: mod_base = OTHER; note = bicyclic nucleic acid (BNA)
  modified_base 14: mod_base = OTHER; note = bicyclic nucleic acid (BNA)
  modified_base 18: mod_base = OTHER; note = bicyclic nucleic acid (BNA)
  source 1..18: mol_type = other RNA
ctgtccaagcccggttga

SEQ ID NO: 12523 - RNA, 18 nt, synthetic construct
  misc_feature 1..18: note = Description of Artificial Sequence: Synthetic Antisense oligonucleotide
  modified_base 1: mod_base = OTHER; note = 5-methyl
  modified_base 5..6: mod_base = OTHER; note = 5-methyl
  modified_base 10..12: mod_base = OTHER; note = 5-methyl
  modified_base 3: mod_base = OTHER; note = bicyclic nucleic acid (BNA)
  modified_base 14: mod_base = OTHER; note = bicyclic nucleic acid (BNA)
  modified_base 18: mod_base = OTHER; note = bicyclic nucleic acid (BNA)
  source 1..18: mol_type = other RNA
ctgtccaagcccggttga

SEQ ID NO: 12524 - RNA, 18 nt, synthetic construct
  misc_feature 1..18: note = Description of Artificial Sequence: Synthetic Antisense oligonucleotide
  modified_base 1: mod_base = OTHER; note = 5-methyl
  modified_base 5..6: mod_base = OTHER; note = 5-methyl
  modified_base 10..12: mod_base = OTHER; note = 5-methyl
  modified_base 10: mod_base = OTHER; note = bicyclic nucleic acid (BNA)
  modified_base 12: mod_base = OTHER; note = bicyclic nucleic acid (BNA)
  modified_base 18: mod_base = OTHER; note = bicyclic nucleic acid (BNA)
  source 1..18: mol_type = other RNA
ctgtccaagcccggttga

SEQ ID NO: 12525 - RNA, 18 nt, synthetic construct
  misc_feature 1..18: note = Description of Artificial Sequence: Synthetic Antisense oligonucleotide
  modified_base 1: mod_base = OTHER; note = 5-methyl
  modified_base 5..6: mod_base = OTHER; note = 5-methyl
  modified_base 10..12: mod_base = OTHER; note = 5-methyl
  modified_base 12: mod_base = OTHER; note = bicyclic nucleic acid (BNA)
  modified_base 14: mod_base = OTHER; note = bicyclic nucleic acid (BNA)
  modified_base 18: mod_base = OTHER; note = bicyclic nucleic acid (BNA)
  source 1..18: mol_type = other RNA
ctgtccaagcccggttga

SEQ ID NO: 12526 - RNA, 18 nt, synthetic construct
  misc_feature 1..18: note = Description of Artificial Sequence: Synthetic Antisense oligonucleotide
  modified_base 1: mod_base = OTHER; note = 5-methyl
  modified_base 5..6: mod_base = OTHER; note = 5-methyl
  modified_base 10..12: mod_base = OTHER; note = 5-methyl
  modified_base 5: mod_base = OTHER; note = bicyclic nucleic acid (BNA)
  modified_base 11: mod_base = OTHER; note = bicyclic nucleic acid (BNA)
  modified_base 18: mod_base = OTHER; note = bicyclic nucleic acid (BNA)
  source 1..18: mol_type = other RNA
ctgtccaagcccggttga

SEQ ID NO: 12527 - RNA, 18 nt, synthetic construct
  misc_feature 1..18: note = Description of Artificial Sequence: Synthetic Antisense oligonucleotide
  modified_base 1: mod_base = OTHER; note = 5-methyl
  modified_base 5..6: mod_base = OTHER; note = 5-methyl
  modified_base 10..12: mod_base = OTHER; note = 5-methyl
  modified_base 6: mod_base = OTHER; note = bicyclic nucleic acid (BNA)
  modified_base 12: mod_base = OTHER; note = bicyclic nucleic acid (BNA)
  modified_base 18: mod_base = OTHER; note = bicyclic nucleic acid (BNA)
  source 1..18: mol_type = other RNA
ctgtccaagcccggttga

SEQ ID NO: 12528 - RNA, 18 nt, synthetic construct
  misc_feature 1..18: note = Description of Artificial Sequence: Synthetic Antisense oligonucleotide
  modified_base 1: mod_base = OTHER; note = 5-methyl
  modified_base 5..6: mod_base = OTHER; note = 5-methyl
  modified_base 10..12: mod_base = OTHER; note = 5-methyl
  modified_base 5..6: mod_base = OTHER; note = bicyclic nucleic acid (BNA)
  modified_base 18: mod_base = OTHER; note = bicyclic nucleic acid (BNA)
  source 1..18: mol_type = other RNA
ctgtccaagcccggttga

SEQ ID NO: 12529 - RNA, 18 nt, synthetic construct
  misc_feature 1..18: note = Description of Artificial Sequence: Synthetic Antisense oligonucleotide
  modified_base 1: mod_base = OTHER; note = 5-methyl
  modified_base 5..6: mod_base = OTHER; note = 5-methyl
  modified_base 10..12: mod_base = OTHER; note = 5-methyl
  modified_base 11: mod_base = OTHER; note = bicyclic nucleic acid (BNA)
  modified_base 14: mod_base = OTHER; note = bicyclic nucleic acid (BNA)
  modified_base 18: mod_base = OTHER; note = bicyclic nucleic acid (BNA)
  source 1..18: mol_type = other RNA
ctgtccaagcccggttga

SEQ ID NO: 12530 - RNA, 18 nt, synthetic construct
  misc_feature 1..18: note = Description of Artificial Sequence: Synthetic Antisense oligonucleotide
  modified_base 1: mod_base = OTHER; note = 5-methyl
  modified_base 5..6: mod_base = OTHER; note = 5-methyl
  modified_base 10..12: mod_base = OTHER; note = 5-methyl
  modified_base 9: mod_base = OTHER; note = bicyclic nucleic acid (BNA)
  modified_base 12: mod_base = OTHER; note = bicyclic nucleic acid (BNA)
  modified_base 18: mod_base = OTHER; note = bicyclic nucleic acid (BNA)
  source 1..18: mol_type = other RNA
ctgtccaagcccggttga

SEQ ID NO: 12531 - RNA, 18 nt, synthetic construct
  misc_feature 1..18: note = Description of Artificial Sequence: Synthetic Antisense oligonucleotide
  modified_base 1: mod_base = OTHER; note = 5-methyl
  modified_base 5..6: mod_base = OTHER; note = 5-methyl
  modified_base 10..12: mod_base = OTHER; note = 5-methyl
  modified_base 3: mod_base = OTHER; note = bicyclic nucleic acid (BNA)
  modified_base 11: mod_base = OTHER; note = bicyclic nucleic acid (BNA)
  modified_base 18: mod_base = OTHER; note = bicyclic nucleic acid (BNA)
  source 1..18: mol_type = other RNA
ctgtccaagcccggttga

SEQ ID NO: 12532 - RNA, 18 nt, synthetic construct
  misc_feature 1..18: note = Description of Artificial Sequence: Synthetic Antisense oligonucleotide
  modified_base 1: mod_base = OTHER; note = 5-methyl
  modified_base 5..6: mod_base = OTHER; note = 5-methyl
  modified_base 10..12: mod_base = OTHER; note = 5-methyl
  modified_base 10..11: mod_base = OTHER; note = bicyclic nucleic acid (BNA)
  modified_base 18: mod_base = OTHER; note = bicyclic nucleic acid (BNA)
  source 1..18: mol_type = other RNA
ctgtccaagcccggttga

SEQ ID NO: 12533 - RNA, 18 nt, synthetic construct
  misc_feature 1..18: note = Description of Artificial Sequence: Synthetic Antisense oligonucleotide
  modified_base 1: mod_base = OTHER; note = 5-methyl
  modified_base 5..6: mod_base = OTHER; note = 5-methyl
  modified_base 10..12: mod_base = OTHER; note = 5-methyl
  modified_base 12..13: mod_base = OTHER; note = bicyclic nucleic acid (BNA)
  modified_base 18: mod_base = OTHER; note = bicyclic nucleic acid (BNA)
  source 1..18: mol_type = other RNA
ctgtccaagcccggttga

SEQ ID NO: 12534 - RNA, 18 nt, synthetic construct
  misc_feature 1..18: note = Description of Artificial Sequence: Synthetic Antisense oligonucleotide
  modified_base 1: mod_base = OTHER; note = 5-methyl
  modified_base 5..6: mod_base = OTHER; note = 5-methyl
  modified_base 10..12: mod_base = OTHER; note = 5-methyl
  modified_base 5: mod_base = OTHER; note = bicyclic nucleic acid (BNA)
  modified_base 12: mod_base = OTHER; note = bicyclic nucleic acid (BNA)
  modified_base 18: mod_base = OTHER; note = bicyclic nucleic acid (BNA)
  source 1..18: mol_type = other RNA
ctgtccaagcccggttga

SEQ ID NO: 12535 - RNA, 18 nt, synthetic construct
  misc_feature 1..18: note = Description of Artificial Sequence: Synthetic Antisense oligonucleotide
  modified_base 1: mod_base = OTHER; note = 5-methyl
  modified_base 5..6: mod_base = OTHER; note = 5-methyl
  modified_base 10..12: mod_base = OTHER; note = 5-methyl
  modified_base 10: mod_base = OTHER; note = bicyclic nucleic acid (BNA)
  modified_base 14: mod_base = OTHER; note = bicyclic nucleic acid (BNA)
  modified_base 18: mod_base = OTHER; note = bicyclic nucleic acid (BNA)
  source 1..18: mol_type = other RNA
ctgtccaagcccggttga

SEQ ID NO: 12536 - RNA, 18 nt, synthetic construct
  misc_feature 1..18: note = Description of Artificial Sequence: Synthetic Antisense oligonucleotide
  modified_base 1: mod_base = OTHER; note = 5-methyl
  modified_base 5..6: mod_base = OTHER; note = 5-methyl
  modified_base 10..12: mod_base = OTHER; note = 5-methyl
  modified_base 6: mod_base = OTHER; note = bicyclic nucleic acid (BNA)
  modified_base 11: mod_base = OTHER; note = bicyclic nucleic acid (BNA)
  modified_base 18: mod_base = OTHER; note = bicyclic nucleic acid (BNA)
  source 1..18: mol_type = other RNA
ctgtccaagcccggttga

SEQ ID NO: 12537 - RNA, 18 nt, synthetic construct
  misc_feature 1..18: note = Description of Artificial Sequence: Synthetic Antisense oligonucleotide
  modified_base 1: mod_base = OTHER; note = 5-methyl
  modified_base 5..6: mod_base = OTHER; note = 5-methyl
  modified_base 10..12: mod_base = OTHER; note = 5-methyl
  modified_base 9: mod_base = OTHER; note = bicyclic nucleic acid (BNA)
  modified_base 13: mod_base = OTHER; note = bicyclic nucleic acid (BNA)
  modified_base 18: mod_base = OTHER; note = bicyclic nucleic acid (BNA)
  source 1..18: mol_type = other RNA
ctgtccaagcccggttga

SEQ ID NO: 12538 - RNA, 18 nt, synthetic construct
  misc_feature 1..18: note = Description of Artificial Sequence: Synthetic Antisense oligonucleotide
  modified_base 1: mod_base = OTHER; note = 5-methyl
  modified_base 5..6: mod_base = OTHER; note = 5-methyl
  modified_base 10..12: mod_base = OTHER; note = 5-methyl
  modified_base 3: mod_base = OTHER; note = bicyclic nucleic acid (BNA)
  modified_base 12: mod_base = OTHER; note = bicyclic nucleic acid (BNA)
  modified_base 18: mod_base = OTHER; note = bicyclic nucleic acid (BNA)
  source 1..18: mol_type = other RNA
ctgtccaagcccggttga

SEQ ID NO: 12539 - RNA, 18 nt, synthetic construct
  misc_feature 1..18: note = Description of Artificial Sequence: Synthetic Antisense oligonucleotide
  modified_base 1: mod_base = OTHER; note = 5-methyl
  modified_base 5..6: mod_base = OTHER; note = 5-methyl
  modified_base 10..12: mod_base = OTHER; note = 5-methyl
  modified_base 3: mod_base = OTHER; note = bicyclic nucleic acid (BNA)
  modified_base 5: mod_base = OTHER; note = bicyclic nucleic acid (BNA)
  modified_base 18: mod_base = OTHER; note = bicyclic nucleic acid (BNA)
  source 1..18: mol_type = other RNA
ctgtccaagcccggttga

SEQ ID NO: 12540 - RNA, 18 nt, synthetic construct
  misc_feature 1..18: note = Description of Artificial Sequence: Synthetic Antisense oligonucleotide
  modified_base 1: mod_base = OTHER; note = 5-methyl
  modified_base 5..6: mod_base = OTHER; note = 5-methyl
  modified_base 10..12: mod_base = OTHER; note = 5-methyl
  modified_base 10: mod_base = OTHER; note = bicyclic nucleic acid (BNA)
  modified_base 13: mod_base = OTHER; note = bicyclic nucleic acid (BNA)
  modified_base 18: mod_base = OTHER; note = bicyclic nucleic acid (BNA)
  source 1..18: mol_type = other RNA
ctgtccaagcccggttga

SEQ ID NO: 12541 - DNA, 20 bp, synthetic construct
  misc_feature 1..20: note = Description of Artificial Sequence: Synthetic Antisense oligonucleotide
  misc_feature 1..20: note = Original Sequence: ucaaggaagauggcauuuct
  modified_base 2: mod_base = OTHER; note = 5-methyl
  modified_base 14: mod_base = OTHER; note = 5-methyl
  modified_base 19: mod_base = OTHER; note = 5-methyl
  modified_base 2: mod_base = OTHER; note = bicyclic nucleic acid (BNA)
  modified_base 20: mod_base = OTHER; note = bicyclic nucleic acid (BNA)
  source 1..20: mol_type = other DNA
  modified_base 1: mod_base = OTHER; note = Uracil
  modified_base 11: mod_base = OTHER; note = Uracil
  modified_base 16: mod_base = OTHER; note = Uracil
  modified_base 17: mod_base = OTHER; note = Uracil
  modified_base 18: mod_base = OTHER; note = Uracil
tcaaggaagatggcatttct

SEQ ID NO: 12542 - DNA, 20 bp, synthetic construct
  misc_feature 1..20: note = Description of Artificial Sequence: Synthetic Antisense oligonucleotide
  misc_feature 1..20: note = Original Sequence: ucaaggaagauggcauuuct
  modified_base 2: mod_base = OTHER; note = 5-methyl
  modified_base 14: mod_base = OTHER; note = 5-methyl
  modified_base 19: mod_base = OTHER; note = 5-methyl
  modified_base 9: mod_base = OTHER; note = bicyclic nucleic acid (BNA)
  modified_base 20: mod_base = OTHER; note = bicyclic nucleic acid (BNA)
  source 1..20: mol_type = other DNA
  modified_base 1: mod_base = OTHER; note = Uracil
  modified_base 11: mod_base = OTHER; note = Uracil
  modified_base 16: mod_base = OTHER; note = Uracil
  modified_base 17: mod_base = OTHER; note = Uracil
  modified_base 18: mod_base = OTHER; note = Uracil
tcaaggaagatggcatttct

SEQ ID NO: 12543 - DNA, 20 bp, synthetic construct
  misc_feature 1..20: note = Description of Artificial Sequence: Synthetic Antisense oligonucleotide
  misc_feature 1..20: note = Original Sequence: ucaaggaagauggcauuuct
  modified_base 2: mod_base = OTHER; note = 5-methyl
  modified_base 14: mod_base = OTHER; note = 5-methyl
  modified_base 19: mod_base = OTHER; note = 5-methyl
  modified_base 5: mod_base = OTHER; note = bicyclic nucleic acid (BNA)
  modified_base 20: mod_base = OTHER; note = bicyclic nucleic acid (BNA)
  source 1..20: mol_type = other DNA
  modified_base 1: mod_base = OTHER; note = Uracil
  modified_base 11: mod_base = OTHER; note = Uracil
  modified_base 16: mod_base = OTHER; note = Uracil
  modified_base 17: mod_base = OTHER; note = Uracil
  modified_base 18: mod_base = OTHER; note = Uracil
tcaaggaagatggcatttct

SEQ ID NO: 12544 - DNA, 20 bp, synthetic construct
  misc_feature 1..20: note = Description of Artificial Sequence: Synthetic Antisense oligonucleotide
  misc_feature 1..20: note = Original Sequence: ucaaggaagauggcauuuct
  modified_base 2: mod_base = OTHER; note = 5-methyl
  modified_base 14: mod_base = OTHER; note = 5-methyl
  modified_base 19: mod_base = OTHER; note = 5-methyl
  modified_base 6: mod_base = OTHER; note = bicyclic nucleic acid (BNA)
  modified_base 20: mod_base = OTHER; note = bicyclic nucleic acid (BNA)
  source 1..20: mol_type = other DNA
  modified_base 1: mod_base = OTHER; note = Uracil
  modified_base 11: mod_base = OTHER; note = Uracil
  modified_base 16: mod_base = OTHER; note = Uracil
  modified_base 17: mod_base = OTHER; note = Uracil
  modified_base 18: mod_base = OTHER; note = Uracil
tcaaggaagatggcatttct

SEQ ID NO: 12545 - DNA, 20 bp, synthetic construct
  misc_feature 1..20: note = Description of Artificial Sequence: Synthetic Antisense oligonucleotide
  misc_feature 1..20: note = Original Sequence: ucaaggaagauggcauuuct
  modified_base 2: mod_base = OTHER; note = 5-methyl
  modified_base 14: mod_base = OTHER; note = 5-methyl
  modified_base 19: mod_base = OTHER; note = 5-methyl
  modified_base 12: mod_base = OTHER; note = bicyclic nucleic acid (BNA)
  modified_base 20: mod_base = OTHER; note = bicyclic nucleic acid (BNA)
  source 1..20: mol_type = other DNA
  modified_base 1: mod_base = OTHER; note = Uracil
  modified_base 11: mod_base = OTHER; note = Uracil
  modified_base 16: mod_base = OTHER; note = Uracil
  modified_base 17: mod_base = OTHER; note = Uracil
  modified_base 18: mod_base = OTHER; note = Uracil
tcaaggaagatggcatttct

SEQ ID NO: 12546 - DNA, 20 bp, synthetic construct
  misc_feature 1..20: note = Description of Artificial Sequence: Synthetic Antisense oligonucleotide
  misc_feature 1..20: note = Original Sequence: ucaaggaagauggcauuuct
  modified_base 2: mod_base = OTHER; note = 5-methyl
  modified_base 14: mod_base = OTHER; note = 5-methyl
  modified_base 19: mod_base = OTHER; note = 5-methyl
  modified_base 13: mod_base = OTHER; note = bicyclic nucleic acid (BNA)
  modified_base 20: mod_base = OTHER; note = bicyclic nucleic acid (BNA)
  source 1..20: mol_type = other DNA
  modified_base 1: mod_base = OTHER; note = Uracil
  modified_base 11: mod_base = OTHER; note = Uracil
  modified_base 16: mod_base = OTHER; note = Uracil
  modified_base 17: mod_base = OTHER; note = Uracil
  modified_base 18: mod_base = OTHER; note = Uracil
tcaaggaagatggcatttct

SEQ ID NO: 12547 - DNA, 20 bp, synthetic construct
  misc_feature 1..20: note = Description of Artificial Sequence: Synthetic Antisense oligonucleotide
  misc_feature 1..20: note = Original Sequence: ucaaggaagauggcauuuct
  modified_base 2: mod_base = OTHER; note = 5-methyl
  modified_base 14: mod_base = OTHER; note = 5-methyl
  modified_base 19: mod_base = OTHER; note = 5-methyl
  modified_base 14: mod_base = OTHER; note = bicyclic nucleic acid (BNA)
  modified_base 20: mod_base = OTHER; note = bicyclic nucleic acid (BNA)
  source 1..20: mol_type = other DNA
  modified_base 1: mod_base = OTHER; note = Uracil
  modified_base 11: mod_base = OTHER; note = Uracil
  modified_base 16: mod_base = OTHER; note = Uracil
  modified_base 17: mod_base = OTHER; note = Uracil
  modified_base 18: mod_base = OTHER; note = Uracil
tcaaggaagatggcatttct

SEQ ID NO: 12548 - RNA, 22 nt, synthetic construct
  misc_feature 1..22: note = Description of Artificial Sequence: Synthetic Antisense oligonucleotide
  modified_base 2: mod_base = OTHER; note = 5-methyl
  modified_base 14: mod_base = OTHER; note = 5-methyl
  modified_base 19: mod_base = OTHER; note = 5-methyl
  modified_base 2: mod_base = OTHER; note = bicyclic nucleic acid (BNA)
  modified_base 22: mod_base = OTHER; note = bicyclic nucleic acid (BNA)
  source 1..22: mol_type = other RNA
tcaaggaagatggcatttctag

SEQ ID NO: 12549 - RNA, 22 nt, synthetic construct
  misc_feature 1..22: note = Description of Artificial Sequence: Synthetic Antisense oligonucleotide
  modified_base 2: mod_base = OTHER; note = 5-methyl
  modified_base 14: mod_base = OTHER; note = 5-methyl
  modified_base 19: mod_base = OTHER; note = 5-methyl
  modified_base 9: mod_base = OTHER; note = bicyclic nucleic acid (BNA)
  modified_base 22: mod_base = OTHER; note = bicyclic nucleic acid (BNA)
  source 1..22: mol_type = other RNA
tcaaggaagatggcatttctag

SEQ ID NO: 12550 - RNA, 22 nt, synthetic construct
  misc_feature 1..22: note = Description of Artificial Sequence: Synthetic Antisense oligonucleotide
  modified_base 2: mod_base = OTHER; note = 5-methyl
  modified_base 14: mod_base = OTHER; note = 5-methyl
  modified_base 19: mod_base = OTHER; note = 5-methyl
  modified_base 5: mod_base = OTHER; note = bicyclic nucleic acid (BNA)
  modified_base 22: mod_base = OTHER; note = bicyclic nucleic acid (BNA)
  source 1..22: mol_type = other RNA
tcaaggaagatggcatttctag

SEQ ID NO: 12551 - RNA, 22 nt, synthetic construct
  misc_feature 1..22: note = Description of Artificial Sequence: Synthetic Antisense oligonucleotide
  modified_base 2: mod_base = OTHER; note = 5-methyl
  modified_base 14: mod_base = OTHER; note = 5-methyl
  modified_base 19: mod_base = OTHER; note = 5-methyl
  modified_base 6: mod_base = OTHER; note = bicyclic nucleic acid (BNA)
  modified_base 22: mod_base = OTHER; note = bicyclic nucleic acid (BNA)
  source 1..22: mol_type = other RNA
tcaaggaagatggcatttctag

SEQ ID NO: 12552 - RNA, 22 nt, synthetic construct
  misc_feature 1..22: note = Description of Artificial Sequence: Synthetic Antisense oligonucleotide
  modified_base 2: mod_base = OTHER; note = 5-methyl
  modified_base 14: mod_base = OTHER; note = 5-methyl
  modified_base 19: mod_base = OTHER; note = 5-methyl
  modified_base 12: mod_base = OTHER; note = bicyclic nucleic acid (BNA)
  modified_base 22: mod_base = OTHER; note = bicyclic nucleic acid (BNA)
  source 1..22: mol_type = other RNA
tcaaggaagatggcatttctag

SEQ ID NO: 12553 - RNA, 22 nt, synthetic construct
  misc_feature 1..22: note = Description of Artificial Sequence: Synthetic Antisense oligonucleotide
  modified_base 2: mod_base = OTHER; note = 5-methyl
  modified_base 14: mod_base = OTHER; note = 5-methyl
  modified_base 19: mod_base = OTHER; note = 5-methyl
  modified_base 13: mod_base = OTHER; note = bicyclic nucleic acid (BNA)
  modified_base 22: mod_base = OTHER; note = bicyclic nucleic acid (BNA)
  source 1..22: mol_type = other RNA
tcaaggaagatggcatttctag

SEQ ID NO: 12554 - RNA, 22 nt, synthetic construct
  misc_feature 1..22: note = Description of Artificial Sequence: Synthetic Antisense oligonucleotide
  modified_base 2: mod_base = OTHER; note = 5-methyl
  modified_base 14: mod_base = OTHER; note = 5-methyl
  modified_base 19: mod_base = OTHER; note = 5-methyl
  modified_base 19: mod_base = OTHER; note = bicyclic nucleic acid (BNA)
  modified_base 22: mod_base = OTHER; note = bicyclic nucleic acid (BNA)
  source 1..22: mol_type = other RNA
tcaaggaagatggcatttctag

SEQ ID NO: 12555 - RNA, 22 nt, synthetic construct
  misc_feature 1..22: note = Description of Artificial Sequence: Synthetic Antisense oligonucleotide
  modified_base 2: mod_base = OTHER; note = 5-methyl
  modified_base 14: mod_base = OTHER; note = 5-methyl
  modified_base 19: mod_base = OTHER; note = 5-methyl
  modified_base 14: mod_base = OTHER; note = bicyclic nucleic acid (BNA)
  modified_base 22: mod_base = OTHER; note = bicyclic nucleic acid (BNA)
  source 1..22: mol_type = other RNA
tcaaggaagatggcatttctag

SEQ ID NO: 12556 - DNA, 20 bp, synthetic construct
  misc_feature 1..20: note = Description of Artificial Sequence: Synthetic Antisense oligonucleotide
  misc_feature 1..20: note = Original Sequence: ucaaggaagauggcauuuct
  modified_base 2: mod_base = OTHER; note = 5-methyl
  modified_base 14: mod_base = OTHER; note = 5-methyl
  modified_base 19: mod_base = OTHER; note = 5-methyl
  modified_base 9: mod_base = OTHER; note = bicyclic nucleic acid (BNA)
  modified_base 14: mod_base = OTHER; note = bicyclic nucleic acid (BNA)
  modified_base 20: mod_base = OTHER; note = bicyclic nucleic acid (BNA)
  source 1..20: mol_type = other DNA
  modified_base 1: mod_base = OTHER; note = Uracil
  modified_base 11: mod_base = OTHER; note = Uracil
  modified_base 16: mod_base = OTHER; note = Uracil
  modified_base 17: mod_base = OTHER; note = Uracil
  modified_base 18: mod_base = OTHER; note = Uracil
tcaaggaagatggcatttct

SEQ ID NO: 12557 - DNA, 20 bp, synthetic construct
  misc_feature 1..20: note = Description of Artificial Sequence: Synthetic Antisense oligonucleotide
  misc_feature 1..20: note = Original Sequence: ucaaggaagauggcauuuct
  modified_base 2: mod_base = OTHER; note = 5-methyl
  modified_base 14: mod_base = OTHER; note = 5-methyl
  modified_base 19: mod_base = OTHER; note = 5-methyl
  modified_base 5: mod_base = OTHER; note = bicyclic nucleic acid (BNA)
  modified_base 9: mod_base = OTHER; note = bicyclic nucleic acid (BNA)
  modified_base 20: mod_base = OTHER; note = bicyclic nucleic acid (BNA)
  source 1..20: mol_type = other DNA
  modified_base 1: mod_base = OTHER; note = Uracil
  modified_base 11: mod_base = OTHER; note = Uracil
  modified_base 16: mod_base = OTHER; note = Uracil
  modified_base 17: mod_base = OTHER; note = Uracil
  modified_base 18: mod_base = OTHER; note = Uracil
tcaaggaagatggcatttct

SEQ ID NO: 12558 - DNA, 20 bp, synthetic construct
  misc_feature 1..20: note = Description of Artificial Sequence: Synthetic Antisense oligonucleotide
  misc_feature 1..20: note = Original Sequence: ucaaggaagauggcauuuct
  modified_base 2: mod_base = OTHER; note = 5-methyl
  modified_base 14: mod_base = OTHER; note = 5-methyl
  modified_base 19: mod_base = OTHER; note = 5-methyl
  modified_base 6: mod_base = OTHER; note = bicyclic nucleic acid (BNA)
  modified_base 14: mod_base = OTHER; note = bicyclic nucleic acid (BNA)
  modified_base 20: mod_base = OTHER; note = bicyclic nucleic acid (BNA)
  source 1..20: mol_type = other DNA
  modified_base 1: mod_base = OTHER; note = Uracil
  modified_base 11: mod_base = OTHER; note = Uracil
  modified_base 16: mod_base = OTHER; note = Uracil
  modified_base 17: mod_base = OTHER; note = Uracil
  modified_base 18: mod_base = OTHER; note = Uracil
tcaaggaagatggcatttct

SEQ ID NO: 12559 - DNA, 20 bp, synthetic construct
  misc_feature 1..20: note = Description of Artificial Sequence: Synthetic Antisense oligonucleotide
  misc_feature 1..20: note = Original Sequence: ucaaggaagauggcauuuct
  modified_base 2: mod_base = OTHER; note = 5-methyl
  modified_base 14: mod_base = OTHER; note = 5-methyl
  modified_base 19: mod_base = OTHER; note = 5-methyl
  modified_base 5: mod_base = OTHER; note = bicyclic nucleic acid (BNA)
  modified_base 13: mod_base = OTHER; note = bicyclic nucleic acid (BNA)
  modified_base 20: mod_base = OTHER; note = bicyclic nucleic acid (BNA)
  source 1..20: mol_type = other DNA
  modified_base 1: mod_base = OTHER; note = Uracil
  modified_base 11: mod_base = OTHER; note = Uracil
  modified_base 16: mod_base = OTHER; note = Uracil
  modified_base 17: mod_base = OTHER; note = Uracil
  modified_base 18: mod_base = OTHER; note = Uracil
tcaaggaagatggcatttct

SEQ ID NO: 12560 - DNA, 20 bp, synthetic construct
  misc_feature 1..20: note = Description of Artificial Sequence: Synthetic Antisense oligonucleotide
  misc_feature 1..20: note = Original Sequence: ucaaggaagauggcauuuct
  modified_base 2: mod_base = OTHER; note = 5-methyl
  modified_base 14: mod_base = OTHER; note = 5-methyl
  modified_base 19: mod_base = OTHER; note = 5-methyl
  modified_base 2: mod_base = OTHER; note = bicyclic nucleic acid (BNA)
  modified_base 12: mod_base = OTHER; note = bicyclic nucleic acid (BNA)
  modified_base 20: mod_base = OTHER; note = bicyclic nucleic acid (BNA)
  source 1..20: mol_type = other DNA
  modified_base 1: mod_base = OTHER; note = Uracil
  modified_base 11: mod_base = OTHER; note = Uracil
  modified_base 16: mod_base = OTHER; note = Uracil
  modified_base 17: mod_base = OTHER; note = Uracil
  modified_base 18: mod_base = OTHER; note = Uracil
tcaaggaagatggcatttct

SEQ ID NO: 12561 - DNA, 20 bp, synthetic construct
  misc_feature 1..20: note = Description of Artificial Sequence: Synthetic Antisense oligonucleotide
  misc_feature 1..20: note = Original Sequence: ucaaggaagauggcauuuct
  modified_base 2: mod_base = OTHER; note = 5-methyl
  modified_base 14: mod_base = OTHER; note = 5-methyl
  modified_base 19: mod_base = OTHER; note = 5-methyl
  modified_base 6: mod_base = OTHER; note = bicyclic nucleic acid (BNA)
  modified_base 9: mod_base = OTHER; note = bicyclic nucleic acid (BNA)
  modified_base 20: mod_base = OTHER; note = bicyclic nucleic acid (BNA)
  source 1..20: mol_type = other DNA
  modified_base 1: mod_base = OTHER; note = Uracil
  modified_base 11: mod_base = OTHER; note = Uracil
  modified_base 16: mod_base = OTHER; note = Uracil
  modified_base 17: mod_base = OTHER; note = Uracil
  modified_base 18: mod_base = OTHER; note = Uracil
tcaaggaagatggcatttct

SEQ ID NO: 12562 - DNA, 20 bp, synthetic construct
  misc_feature 1..20: note = Description of Artificial Sequence: Synthetic Antisense oligonucleotide
  misc_feature 1..20: note = Original Sequence: ucaaggaagauggcauuuct
  modified_base 2: mod_base = OTHER; note = 5-methyl
  modified_base 14: mod_base = OTHER; note = 5-methyl
  modified_base 19: mod_base = OTHER; note = 5-methyl
  modified_base 13..14: mod_base = OTHER; note = bicyclic nucleic acid (BNA)
  modified_base 20: mod_base = OTHER; note = bicyclic nucleic acid (BNA)
  source 1..20: mol_type = other DNA
  modified_base 1: mod_base = OTHER; note = Uracil
  modified_base 11: mod_base = OTHER; note = Uracil
  modified_base 16: mod_base = OTHER; note = Uracil
  modified_base 17: mod_base = OTHER; note = Uracil
  modified_base 18: mod_base = OTHER; note = Uracil
tcaaggaagatggcatttct

SEQ ID NO: 12563 - DNA, 20 bp, synthetic construct
  misc_feature 1..20: note = Description of Artificial Sequence: Synthetic Antisense oligonucleotide
  misc_feature 1..20: note = Original Sequence: ucaaggaagauggcauuuct
  modified_base 2: mod_base = OTHER; note = 5-methyl
  modified_base 14: mod_base = OTHER; note = 5-methyl
  modified_base 19: mod_base = OTHER; note = 5-methyl
  modified_base 6: mod_base = OTHER; note = bicyclic nucleic acid (BNA)
  modified_base 13: mod_base = OTHER; note = bicyclic nucleic acid (BNA)
  modified_base 20: mod_base = OTHER; note = bicyclic nucleic acid (BNA)
  source 1..20: mol_type = other DNA
  modified_base 1: mod_base = OTHER; note = Uracil
  modified_base 11: mod_base = OTHER; note = Uracil
  modified_base 16: mod_base = OTHER; note = Uracil
  modified_base 17: mod_base = OTHER; note = Uracil
  modified_base 18: mod_base = OTHER; note = Uracil
tcaaggaagatggcatttct

SEQ ID NO: 12564 - DNA, 20 bp, synthetic construct
  misc_feature 1..20: note = Description of Artificial Sequence: Synthetic Antisense oligonucleotide
  misc_feature 1..20: note = Original Sequence: ucaaggaagauggcauuuct
  modified_base 2: mod_base = OTHER; note = 5-methyl
  modified_base 14: mod_base = OTHER; note = 5-methyl
  modified_base 19: mod_base = OTHER; note = 5-methyl
  modified_base 5: mod_base = OTHER; note = bicyclic nucleic acid (BNA)
  modified_base 14: mod_base = OTHER; note = bicyclic nucleic acid (BNA)
  modified_base 20: mod_base = OTHER; note = bicyclic nucleic acid (BNA)
  source 1..20: mol_type = other DNA
  modified_base 1: mod_base = OTHER; note = Uracil
  modified_base 11: mod_base = OTHER; note = Uracil
  modified_base 16: mod_base = OTHER; note = Uracil
  modified_base 17: mod_base = OTHER; note = Uracil
  modified_base 18: mod_base = OTHER; note = Uracil
tcaaggaagatggcatttct

SEQ ID NO: 12565 - DNA, 20 bp, synthetic construct
  misc_feature 1..20: note = Description of Artificial Sequence: Synthetic Antisense oligonucleotide
  misc_feature 1..20: note = Original Sequence: ucaaggaagauggcauuuct
  modified_base 2: mod_base = OTHER; note = 5-methyl
  modified_base 14: mod_base = OTHER; note = 5-methyl
  modified_base 19: mod_base = OTHER; note = 5-methyl
  modified_base 2: mod_base = OTHER; note = bicyclic nucleic acid (BNA)
  modified_base 6: mod_base = OTHER; note = bicyclic nucleic acid (BNA)
  modified_base 20: mod_base = OTHER; note = bicyclic nucleic acid (BNA)
  source 1..20: mol_type = other DNA
  modified_base 1: mod_base = OTHER; note = Uracil
  modified_base 11: mod_base = OTHER; note = Uracil
  modified_base 16: mod_base = OTHER; note = Uracil
  modified_base 17: mod_base = OTHER; note = Uracil
  modified_base 18: mod_base = OTHER; note = Uracil
tcaaggaagatggcatttct

SEQ ID NO: 12566 - DNA, 20 bp, synthetic construct
  misc_feature 1..20: note = Description of Artificial Sequence: Synthetic Antisense oligonucleotide
  misc_feature 1..20: note = Original Sequence: ucaaggaagauggcauuuct
  modified_base 2: mod_base = OTHER; note = 5-methyl
  modified_base 14: mod_base = OTHER; note = 5-methyl
  modified_base 19: mod_base = OTHER; note = 5-methyl
  modified_base 12: mod_base = OTHER; note = bicyclic nucleic acid (BNA)
  modified_base 14: mod_base = OTHER; note = bicyclic nucleic acid (BNA)
  modified_base 20: mod_base = OTHER; note = bicyclic nucleic acid (BNA)
  source 1..20: mol_type = other DNA
  modified_base 1: mod_base = OTHER; note = Uracil
  modified_base 11: mod_base = OTHER; note = Uracil
  modified_base 16: mod_base = OTHER; note = Uracil
  modified_base 17: mod_base = OTHER; note = Uracil
  modified_base 18: mod_base = OTHER; note = Uracil
tcaaggaagatggcatttct

SEQ ID NO: 12567 - DNA, 20 bp, synthetic construct
  misc_feature 1..20: note = Description of Artificial Sequence: Synthetic Antisense oligonucleotide
  misc_feature 1..20: note = Original Sequence: ucaaggaagauggcauuuct
  modified_base 2: mod_base = OTHER; note = 5-methyl
  modified_base 14: mod_base = OTHER; note = 5-methyl
  modified_base 19: mod_base = OTHER; note = 5-methyl
  modified_base 6: mod_base = OTHER; note = bicyclic nucleic acid (BNA)
  modified_base 12: mod_base = OTHER; note = bicyclic nucleic acid (BNA)
  modified_base 20: mod_base = OTHER; note = bicyclic nucleic acid (BNA)
  source 1..20: mol_type = other DNA
  modified_base 1: mod_base = OTHER; note = Uracil
  modified_base 11: mod_base = OTHER; note = Uracil
  modified_base 16: mod_base = OTHER; note = Uracil
  modified_base 17: mod_base = OTHER; note = Uracil
  modified_base 18: mod_base = OTHER; note = Uracil
tcaaggaagatggcatttct

SEQ ID NO: 12568 - DNA, 20 bp, synthetic construct
  misc_feature 1..20: note = Description of Artificial Sequence: Synthetic Antisense oligonucleotide
  misc_feature 1..20: note = Original Sequence: ucaaggaagauggcauuuct
  modified_base 2: mod_base = OTHER; note = 5-methyl
  modified_base 14: mod_base = OTHER; note = 5-methyl
  modified_base 19: mod_base = OTHER; note = 5-methyl
  modified_base 5..6: mod_base = OTHER; note = bicyclic nucleic acid (BNA)
  modified_base 20: mod_base = OTHER; note = bicyclic nucleic acid (BNA)
  source 1..20: mol_type = other DNA
  modified_base 1: mod_base = OTHER; note = Uracil
  modified_base 11: mod_base = OTHER; note = Uracil
  modified_base 16: mod_base = OTHER; note = Uracil
  modified_base 17: mod_base = OTHER; note = Uracil
  modified_base 18: mod_base = OTHER; note = Uracil
tcaaggaagatggcatttct

SEQ ID NO: 12569 - DNA, 20 bp, synthetic construct
  misc_feature 1..20: note = Description of Artificial Sequence: Synthetic Antisense oligonucleotide
  misc_feature 1..20: note = Original Sequence: ucaaggaagauggcauuuct
  modified_base 2: mod_base = OTHER; note = 5-methyl
  modified_base 14: mod_base = OTHER; note = 5-methyl
  modified_base 19: mod_base = OTHER; note = 5-methyl
  modified_base 2: mod_base = OTHER; note = bicyclic nucleic acid (BNA)
  modified_base 14: mod_base = OTHER; note = bicyclic nucleic acid (BNA)
  modified_base 20: mod_base = OTHER; note = bicyclic nucleic acid (BNA)
  source 1..20: mol_type = other DNA
  modified_base 1: mod_base = OTHER; note = Uracil
  modified_base 11: mod_base = OTHER; note = Uracil
  modified_base 16: mod_base = OTHER; note = Uracil
  modified_base 17: mod_base = OTHER; note = Uracil
  modified_base 18: mod_base = OTHER; note = Uracil
tcaaggaagatggcatttct

SEQ ID NO: 12570 - DNA, 20 bp, synthetic construct
  misc_feature 1..20: note = Description of Artificial Sequence: Synthetic Antisense oligonucleotide
  misc_feature 1..20: note = Original Sequence: ucaaggaagauggcauuuct
  modified_base 2: mod_base = OTHER; note = 5-methyl
  modified_base 14: mod_base = OTHER; note = 5-methyl
  modified_base 19: mod_base = OTHER; note = 5-methyl
  modified_base 9: mod_base = OTHER; note = bicyclic nucleic acid (BNA)
  modified_base 12: mod_base = OTHER; note = bicyclic nucleic acid (BNA)
  modified_base 20: mod_base = OTHER; note = bicyclic nucleic acid (BNA)
  source 1..20: mol_type = other DNA
  modified_base 1: mod_base = OTHER; note = Uracil
  modified_base 11: mod_base = OTHER; note = Uracil
  modified_base 16: mod_base = OTHER; note = Uracil
  modified_base 17: mod_base = OTHER; note = Uracil
  modified_base 18: mod_base = OTHER; note = Uracil
tcaaggaagatggcatttct

SEQ ID NO: 12571 - DNA, 20 bp, synthetic construct
  misc_feature 1..20: note = Description of Artificial Sequence: Synthetic Antisense oligonucleotide
  misc_feature 1..20: note = Original Sequence: ucaaggaagauggcauuuct
  modified_base 2: mod_base = OTHER; note = 5-methyl
  modified_base 14: mod_base = OTHER; note = 5-methyl
  modified_base 19: mod_base = OTHER; note = 5-methyl
  modified_base 2: mod_base = OTHER; note = bicyclic nucleic acid (BNA)
  modified_base 5: mod_base = OTHER; note = bicyclic nucleic acid (BNA)
  modified_base 20: mod_base = OTHER; note = bicyclic nucleic acid (BNA)
  source 1..20: mol_type = other DNA
  modified_base 1: mod_base = OTHER; note = Uracil
  modified_base 11: mod_base = OTHER; note = Uracil
  modified_base 16: mod_base = OTHER; note = Uracil
  modified_base 17: mod_base = OTHER; note = Uracil
  modified_base 18: mod_base = OTHER; note = Uracil
tcaaggaagatggcatttct

SEQ ID NO: 12572 - DNA, 20 bp, synthetic construct
  misc_feature 1..20: note = Description of Artificial Sequence: Synthetic Antisense oligonucleotide
  misc_feature 1..20: note = Original Sequence: ucaaggaagauggcauuuct
  modified_base 2: mod_base = OTHER; note = 5-methyl
  modified_base 14: mod_base = OTHER; note = 5-methyl
  modified_base 19: mod_base = OTHER; note = 5-methyl
  modified_base 12..13: mod_base = OTHER; note = bicyclic nucleic acid (BNA)
  modified_base 20: mod_base = OTHER; note = bicyclic nucleic acid (BNA)
  source 1..20: mol_type = other DNA
  modified_base 1: mod_base = OTHER; note = Uracil
  modified_base 11: mod_base = OTHER; note = Uracil
  modified_base 16: mod_base = OTHER; note = Uracil
  modified_base 17: mod_base = OTHER; note = Uracil
  modified_base 18: mod_base = OTHER; note = Uracil
tcaaggaagatggcatttct

SEQ ID NO: 12573 - DNA, 20 bp, synthetic construct
  misc_feature 1..20: note = Description of Artificial Sequence: Synthetic Antisense oligonucleotide
  misc_feature 1..20: note = Original Sequence: ucaaggaagauggcauuuct
  modified_base 2: mod_base = OTHER; note = 5-methyl
  modified_base 14: mod_base = OTHER; note = 5-methyl
  modified_base 19: mod_base = OTHER; note = 5-methyl
  modified_base 5: mod_base = OTHER; note = bicyclic nucleic acid (BNA)
  modified_base 12: mod_base = OTHER; note = bicyclic nucleic acid (BNA)
  modified_base 20: mod_base = OTHER; note = bicyclic nucleic acid (BNA)
  source 1..20: mol_type = other DNA
  modified_base 1: mod_base = OTHER; note = Uracil
  modified_base 11: mod_base = OTHER; note = Uracil
  modified_base 16: mod_base = OTHER; note = Uracil
  modified_base 17: mod_base = OTHER; note = Uracil
  modified_base 18: mod_base = OTHER; note = Uracil
tcaaggaagatggcatttct

SEQ ID NO: 12574 - DNA, 20 bp, synthetic construct
  misc_feature 1..20: note = Description of Artificial Sequence: Synthetic Antisense oligonucleotide
  misc_feature 1..20: note = Original Sequence: ucaaggaagauggcauuuct
  modified_base 2: mod_base = OTHER; note = 5-methyl
  modified_base 14: mod_base = OTHER; note = 5-methyl
  modified_base 19: mod_base = OTHER; note = 5-methyl
  modified_base 2: mod_base = OTHER; note = bicyclic nucleic acid (BNA)
  modified_base 13: mod_base = OTHER; note = bicyclic nucleic acid (BNA)
  modified_base 20: mod_base = OTHER; note = bicyclic nucleic acid (BNA)
  source 1..20: mol_type = other DNA
  modified_base 1: mod_base = OTHER; note = Uracil
  modified_base 11: mod_base = OTHER; note = Uracil
  modified_base 16: mod_base = OTHER; note = Uracil
  modified_base 17: mod_base = OTHER; note = Uracil
  modified_base 18: mod_base = OTHER; note = Uracil
tcaaggaagatggcatttct

SEQ ID NO: 12575 - DNA, 20 bp, synthetic construct
  misc_feature 1..20: note = Description of Artificial Sequence: Synthetic Antisense oligonucleotide
  misc_feature 1..20: note = Original Sequence: ucaaggaagauggcauuuct
  modified_base 2: mod_base = OTHER; note = 5-methyl
  modified_base 14: mod_base = OTHER; note = 5-methyl
  modified_base 19: mod_base = OTHER; note = 5-methyl
  modified_base 9: mod_base = OTHER; note = bicyclic nucleic acid (BNA)
  modified_base 13: mod_base = OTHER; note = bicyclic nucleic acid (BNA)
  modified_base 20: mod_base = OTHER; note = bicyclic nucleic acid (BNA)
  source 1..20: mol_type = other DNA
  modified_base 1: mod_base = OTHER; note = Uracil
  modified_base 11: mod_base = OTHER; note = Uracil
  modified_base 16: mod_base = OTHER; note = Uracil
  modified_base 17: mod_base = OTHER; note = Uracil
  modified_base 18: mod_base = OTHER; note = Uracil
tcaaggaagatggcatttct

SEQ ID NO: 12576 - DNA, 20 bp, synthetic construct
  misc_feature 1..20: note = Description of Artificial Sequence: Synthetic Antisense oligonucleotide
  misc_feature 1..20: note = Original Sequence: ucaaggaagauggcauuuct
  modified_base 2: mod_base = OTHER; note = 5-methyl
  modified_base 14: mod_base = OTHER; note = 5-methyl
  modified_base 19: mod_base = OTHER; note = 5-methyl
  modified_base 2: mod_base = OTHER; note = bicyclic nucleic acid (BNA)
  modified_base 9: mod_base = OTHER; note = bicyclic nucleic acid (BNA)
  modified_base 20: mod_base = OTHER; note = bicyclic nucleic acid (BNA)
  source 1..20: mol_type = other DNA
  modified_base 1: mod_base = OTHER; note = Uracil
  modified_base 11: mod_base = OTHER; note = Uracil
  modified_base 16: mod_base = OTHER; note = Uracil
  modified_base 17: mod_base = OTHER; note = Uracil
  modified_base 18: mod_base = OTHER; note = Uracil
tcaaggaagatggcatttct

SEQ ID NO: 12577 - RNA, 22 nt, synthetic construct
  misc_feature 1..22: note = Description of Artificial Sequence: Synthetic Antisense oligonucleotide
  modified_base 2: mod_base = OTHER; note = 5-methyl
  modified_base 14: mod_base = OTHER; note = 5-methyl
  modified_base 19: mod_base = OTHER; note = 5-methyl
  modified_base 9: mod_base = OTHER; note = bicyclic nucleic acid (BNA)
  modified_base 14: mod_base = OTHER; note = bicyclic nucleic acid (BNA)
  modified_base 22: mod_base = OTHER; note = bicyclic nucleic acid (BNA)
  source 1..22: mol_type = other RNA
tcaaggaagatggcatttctag

SEQ ID NO: 12578 - RNA, 22 nt, synthetic construct
  misc_feature 1..22: note = Description of Artificial Sequence: Synthetic Antisense oligonucleotide
  modified_base 2: mod_base = OTHER; note = 5-methyl
  modified_base 14: mod_base = OTHER; note = 5-methyl
  modified_base 19: mod_base = OTHER; note = 5-methyl
  modified_base 5: mod_base = OTHER; note = bicyclic nucleic acid (BNA)
  modified_base 9: mod_base = OTHER; note = bicyclic nucleic acid (BNA)
  modified_base 22: mod_base = OTHER; note = bicyclic nucleic acid (BNA)
  source 1..22: mol_type = other RNA
tcaaggaagatggcatttctag

SEQ ID NO: 12579 - RNA, 22 nt, synthetic construct
  misc_feature 1..22: note = Description of Artificial Sequence: Synthetic Antisense oligonucleotide
  modified_base 2: mod_base = OTHER; note = 5-methyl
  modified_base 14: mod_base = OTHER; note = 5-methyl
  modified_base 19: mod_base = OTHER; note = 5-methyl
  modified_base 5: mod_base = OTHER; note = bicyclic nucleic acid (BNA)
  modified_base 19: mod_base = OTHER; note = bicyclic nucleic acid (BNA)
  modified_base 22: mod_base = OTHER; note = bicyclic nucleic acid (BNA)
  source 1..22: mol_type = other RNA
tcaaggaagatggcatttctag

SEQ ID NO: 12580 - RNA, 22 nt, synthetic construct
  misc_feature 1..22: note = Description of Artificial Sequence: Synthetic Antisense oligonucleotide
  modified_base 2: mod_base = OTHER; note = 5-methyl
  modified_base 14: mod_base = OTHER; note = 5-methyl
  modified_base 19: mod_base = OTHER; note = 5-methyl
  modified_base 6: mod_base = OTHER; note = bicyclic nucleic acid (BNA)
  modified_base 14: mod_base = OTHER; note = bicyclic nucleic acid (BNA)
  modified_base 22: mod_base = OTHER; note = bicyclic nucleic acid (BNA)
  source 1..22: mol_type = other RNA
tcaaggaagatggcatttctag

SEQ ID NO: 12581 - RNA, 22 nt, synthetic construct
  misc_feature 1..22: note = Description of Artificial Sequence: Synthetic Antisense oligonucleotide
  modified_base 2: mod_base = OTHER; note = 5-methyl
  modified_base 14: mod_base = OTHER; note = 5-methyl
  modified_base 19: mod_base = OTHER; note = 5-methyl
  modified_base 5: mod_base = OTHER; note = bicyclic nucleic acid (BNA)
  modified_base 13: mod_base = OTHER; note = bicyclic nucleic acid (BNA)
  modified_base 22: mod_base = OTHER; note = bicyclic nucleic acid (BNA)
  source 1..22: mol_type = other RNA
tcaaggaagatggcatttctag

SEQ ID NO: 12582 - RNA, 22 nt, synthetic construct
  misc_feature 1..22: note = Description of Artificial Sequence: Synthetic Antisense oligonucleotide
  modified_base 2: mod_base = OTHER; note = 5-methyl
  modified_base 14: mod_base = OTHER; note = 5-methyl
  modified_base 19: mod_base = OTHER; note = 5-methyl
  modified_base 2: mod_base = OTHER; note = bicyclic nucleic acid (BNA)
  modified_base 12: mod_base = OTHER; note = bicyclic nucleic acid (BNA)
  modified_base 22: mod_base = OTHER; note = bicyclic nucleic acid (BNA)
  source 1..22: mol_type = other RNA
tcaaggaagatggcatttctag

SEQ ID NO: 12583 - RNA, 22 nt, synthetic construct
  misc_feature 1..22: note = Description of Artificial Sequence: Synthetic Antisense oligonucleotide
  modified_base 2: mod_base = OTHER; note = 5-methyl
  modified_base 14: mod_base = OTHER; note = 5-methyl
  modified_base 19: mod_base = OTHER; note = 5-methyl
  modified_base 6: mod_base = OTHER; note = bicyclic nucleic acid (BNA)
  modified_base 9: mod_base = OTHER; note = bicyclic nucleic acid (BNA)
  modified_base 22: mod_base = OTHER; note = bicyclic nucleic acid (BNA)
  source 1..22: mol_type = other RNA
tcaaggaagatggcatttctag

SEQ ID NO: 12584 - RNA, 22 nt, synthetic construct
  misc_feature 1..22: note = Description of Artificial Sequence: Synthetic Antisense oligonucleotide
  modified_base 2: mod_base = OTHER; note = 5-methyl
  modified_base 14: mod_base = OTHER; note = 5-methyl
  modified_base 19: mod_base = OTHER; note = 5-methyl
  modified_base 13..14: mod_base = OTHER; note = bicyclic nucleic acid (BNA)
  modified_base 22: mod_base = OTHER; note = bicyclic nucleic acid (BNA)
  source 1..22: mol_type = other RNA
tcaaggaagatggcatttctag

SEQ ID NO: 12585 - RNA, 22 nt, synthetic construct
  misc_feature 1..22: note = Description of Artificial Sequence: Synthetic Antisense oligonucleotide
  modified_base 2: mod_base = OTHER; note = 5-methyl
  modified_base 14: mod_base = OTHER; note = 5-methyl
  modified_base 19: mod_base = OTHER; note = 5-methyl
  modified_base 6: mod_base = OTHER; note = bicyclic nucleic acid (BNA)
  modified_base 13: mod_base = OTHER; note = bicyclic nucleic acid (BNA)
  modified_base 22: mod_base = OTHER; note = bicyclic nucleic acid (BNA)
  source 1..22: mol_type = other RNA
tcaaggaagatggcatttctag

SEQ ID NO: 12586 - RNA, 22 nt, synthetic construct
  misc_feature 1..22: note = Description of Artificial Sequence: Synthetic Antisense oligonucleotide
  modified_base 2: mod_base = OTHER; note = 5-methyl
  modified_base 14: mod_base = OTHER; note = 5-methyl
  modified_base 19: mod_base = OTHER; note = 5-methyl
  modified_base 6: mod_base = OTHER; note = bicyclic nucleic acid (BNA)
  modified_base 19: mod_base = OTHER; note = bicyclic nucleic acid (BNA)
  modified_base 22: mod_base = OTHER; note = bicyclic nucleic acid (BNA)
  source 1..22: mol_type = other RNA
tcaaggaagatggcatttctag

SEQ ID NO: 12587 - RNA, 22 nt, synthetic construct
  misc_feature 1..22: note = Description of Artificial Sequence: Synthetic Antisense oligonucleotide
  modified_base 2: mod_base = OTHER; note = 5-methyl
  modified_base 14: mod_base = OTHER; note = 5-methyl
  modified_base 19: mod_base = OTHER; note = 5-methyl
  modified_base 5: mod_base = OTHER; note = bicyclic nucleic acid (BNA)
  modified_base 14: mod_base = OTHER; note = bicyclic nucleic acid (BNA)
  modified_base 22: mod_base = OTHER; note = bicyclic nucleic acid (BNA)
  source 1..22: mol_type = other RNA
tcaaggaagatggcatttctag

SEQ ID NO: 12588 - RNA, 22 nt, synthetic construct
  misc_feature 1..22: note = Description of Artificial Sequence: Synthetic Antisense oligonucleotide
  modified_base 2: mod_base = OTHER; note = 5-methyl
  modified_base 14: mod_base = OTHER; note = 5-methyl
  modified_base 19: mod_base = OTHER; note = 5-methyl
  modified_base 2: mod_base = OTHER; note = bicyclic nucleic acid (BNA)
  modified_base 6: mod_base = OTHER; note = bicyclic nucleic acid (BNA)
  modified_base 22: mod_base = OTHER; note = bicyclic nucleic acid (BNA)
  source 1..22: mol_type = other RNA
tcaaggaagatggcatttctag

SEQ ID NO: 12589 - RNA, 22 nt, synthetic construct
  misc_feature 1..22: note = Description of Artificial Sequence: Synthetic Antisense oligonucleotide
  modified_base 2: mod_base = OTHER; note = 5-methyl
  modified_base 14: mod_base = OTHER; note = 5-methyl
  modified_base 19: mod_base = OTHER; note = 5-methyl
  modified_base 12: mod_base = OTHER; note = bicyclic nucleic acid (BNA)
  modified_base 19: mod_base = OTHER; note = bicyclic nucleic acid (BNA)
  modified_base 22: mod_base = OTHER; note = bicyclic nucleic acid (BNA)
  source 1..22: mol_type = other RNA
tcaaggaagatggcatttctag

SEQ ID NO: 12590 - RNA, 22 nt, synthetic construct
  misc_feature 1..22: note = Description of Artificial Sequence: Synthetic Antisense oligonucleotide
  modified_base 2: mod_base = OTHER; note = 5-methyl
  modified_base 14: mod_base = OTHER; note = 5-methyl
  modified_base 19: mod_base = OTHER; note = 5-methyl
  modified_base 12: mod_base = OTHER; note = bicyclic nucleic acid (BNA)
  modified_base 14: mod_base = OTHER; note = bicyclic nucleic acid (BNA)
  modified_base 22: mod_base = OTHER; note = bicyclic nucleic acid (BNA)
  source 1..22: mol_type = other RNA
tcaaggaagatggcatttctag

SEQ ID NO: 12591 - RNA, 22 nt, synthetic construct
  misc_feature 1..22: note = Description of Artificial Sequence: Synthetic Antisense oligonucleotide
  modified_base 2: mod_base = OTHER; note = 5-methyl
  modified_base 14: mod_base = OTHER; note = 5-methyl
  modified_base 19: mod_base = OTHER; note = 5-methyl
  modified_base 6: mod_base = OTHER; note = bicyclic nucleic acid (BNA)
  modified_base 12: mod_base = OTHER; note = bicyclic nucleic acid (BNA)
  modified_base 22: mod_base = OTHER; note = bicyclic nucleic acid (BNA)
  source 1..22: mol_type = other RNA
tcaaggaagatggcatttctag

SEQ ID NO: 12592 - RNA, 22 nt, synthetic construct
  misc_feature 1..22: note = Description of Artificial Sequence: Synthetic Antisense oligonucleotide
  modified_base 2: mod_base = OTHER; note = 5-methyl
  modified_base 14: mod_base = OTHER; note = 5-methyl
  modified_base 19: mod_base = OTHER; note = 5-methyl
  modified_base 5..6: mod_base = OTHER; note = bicyclic nucleic acid (BNA)
  modified_base 22: mod_base = OTHER; note = bicyclic nucleic acid (BNA)
  source 1..22: mol_type = other RNA
tcaaggaagatggcatttctag

SEQ ID NO: 12593 - RNA, 22 nt, synthetic construct
  misc_feature 1..22: note = Description of Artificial Sequence: Synthetic Antisense oligonucleotide
  modified_base 2: mod_base = OTHER; note = 5-methyl
  modified_base 14: mod_base = OTHER; note = 5-methyl
  modified_base 19: mod_base = OTHER; note = 5-methyl
  modified_base 2: mod_base = OTHER; note = bicyclic nucleic acid (BNA)
  modified_base 14: mod_base = OTHER; note = bicyclic nucleic acid (BNA)
  modified_base 22: mod_base = OTHER; note = bicyclic nucleic acid (BNA)
  source 1..22: mol_type = other RNA
tcaaggaagatggcatttctag

SEQ ID NO: 12594 - RNA, 22 nt, synthetic construct
  misc_feature 1..22: note = Description of Artificial Sequence: Synthetic Antisense oligonucleotide
  modified_base 2: mod_base = OTHER; note = 5-methyl
  modified_base 14: mod_base = OTHER; note = 5-methyl
  modified_base 19: mod_base = OTHER; note = 5-methyl
  modified_base 9: mod_base = OTHER; note = bicyclic nucleic acid (BNA)
  modified_base 12: mod_base = OTHER; note = bicyclic nucleic acid (BNA)
  modified_base 22: mod_base = OTHER; note = bicyclic nucleic acid (BNA)
  source 1..22: mol_type = other RNA
tcaaggaagatggcatttctag

SEQ ID NO: 12595 - RNA, 22 nt, synthetic construct
  misc_feature 1..22: note = Description of Artificial Sequence: Synthetic Antisense oligonucleotide
  modified_base 2: mod_base = OTHER; note = 5-methyl
  modified_base 14: mod_base = OTHER; note = 5-methyl
  modified_base 19: mod_base = OTHER; note = 5-methyl
  modified_base 2: mod_base = OTHER; note = bicyclic nucleic acid (BNA)
  modified_base 5: mod_base = OTHER; note = bicyclic nucleic acid (BNA)
  modified_base 22: mod_base = OTHER; note = bicyclic nucleic acid (BNA)
  source 1..22: mol_type = other RNA
tcaaggaagatggcatttctag

SEQ ID NO: 12596 - RNA, 22 nt, synthetic construct
  misc_feature 1..22: note = Description of Artificial Sequence: Synthetic Antisense oligonucleotide
  modified_base 2: mod_base = OTHER; note = 5-methyl
  modified_base 14: mod_base = OTHER; note = 5-methyl
  modified_base 19: mod_base = OTHER; note = 5-methyl
  modified_base 13: mod_base = OTHER; note = bicyclic nucleic acid (BNA)
  modified_base 19: mod_base = OTHER; note = bicyclic nucleic acid (BNA)
  modified_base 22: mod_base = OTHER; note = bicyclic nucleic acid (BNA)
  source 1..22: mol_type = other RNA
tcaaggaagatggcatttctag

SEQ ID NO: 12597 - RNA, 22 nt, synthetic construct
  misc_feature 1..22: note = Description of Artificial Sequence: Synthetic Antisense oligonucleotide
  modified_base 2: mod_base = OTHER; note = 5-methyl
  modified_base 14: mod_base = OTHER; note = 5-methyl
  modified_base 19: mod_base = OTHER; note = 5-methyl
  modified_base 12..13: mod_base = OTHER; note = bicyclic nucleic acid (BNA)
  modified_base 22: mod_base = OTHER; note = bicyclic nucleic acid (BNA)
  source 1..22: mol_type = other RNA
tcaaggaagatggcatttctag

SEQ ID NO: 12598 - RNA, 22 nt, synthetic construct
  misc_feature 1..22: note = Description of Artificial Sequence: Synthetic Antisense oligonucleotide
  modified_base 2: mod_base = OTHER; note = 5-methyl
  modified_base 14: mod_base = OTHER; note = 5-methyl
  modified_base 19: mod_base = OTHER; note = 5-methyl
  modified_base 5: mod_base = OTHER; note = bicyclic nucleic acid (BNA)
  modified_base 12: mod_base = OTHER; note = bicyclic nucleic acid (BNA)
  modified_base 22: mod_base = OTHER; note = bicyclic nucleic acid (BNA)
  source 1..22: mol_type = other RNA
tcaaggaagatggcatttctag

SEQ ID NO: 12599 - RNA, 22 nt, synthetic construct
  misc_feature 1..22: note = Description of Artificial Sequence: Synthetic Antisense oligonucleotide
  modified_base 2: mod_base = OTHER; note = 5-methyl
  modified_base 14: mod_base = OTHER; note = 5-methyl
  modified_base 19: mod_base = OTHER; note = 5-methyl
  modified_base 2: mod_base = OTHER; note = bicyclic nucleic acid (BNA)
  modified_base 13: mod_base = OTHER; note = bicyclic nucleic acid (BNA)
  modified_base 22: mod_base = OTHER; note = bicyclic nucleic acid (BNA)
  source 1..22: mol_type = other RNA
tcaaggaagatggcatttctag

SEQ ID NO: 12600 - RNA, 22 nt, synthetic construct
  misc_feature 1..22: note = Description of Artificial Sequence: Synthetic Antisense oligonucleotide
  modified_base 2: mod_base = OTHER; note = 5-methyl
  modified_base 14: mod_base = OTHER; note = 5-methyl
  modified_base 19: mod_base = OTHER; note = 5-methyl
  modified_base 9: mod_base = OTHER; note = bicyclic nucleic acid (BNA)
  modified_base 13: mod_base = OTHER; note = bicyclic nucleic acid (BNA)
  modified_base 22: mod_base = OTHER; note = bicyclic nucleic acid (BNA)
  source 1..22: mol_type = other RNA
tcaaggaagatggcatttctag

SEQ ID NO: 12601 - RNA, 22 nt, synthetic construct
  misc_feature 1..22: note = Description of Artificial Sequence: Synthetic Antisense oligonucleotide
  modified_base 2: mod_base = OTHER; note = 5-methyl
  modified_base 14: mod_base = OTHER; note = 5-methyl
  modified_base 19: mod_base = OTHER; note = 5-methyl
  modified_base 2: mod_base = OTHER; note = bicyclic nucleic acid (BNA)
  modified_base 19: mod_base = OTHER; note = bicyclic nucleic acid (BNA)
  modified_base 22: mod_base = OTHER; note = bicyclic nucleic acid (BNA)
  source 1..22: mol_type = other RNA
tcaaggaagatggcatttctag

SEQ ID NO: 12602 - RNA, 22 nt, synthetic construct
  misc_feature 1..22: note = Description of Artificial Sequence: Synthetic Antisense oligonucleotide
  modified_base 2: mod_base = OTHER; note = 5-methyl
  modified_base 14: mod_base = OTHER; note = 5-methyl
  modified_base 19: mod_base = OTHER; note = 5-methyl
  modified_base 2: mod_base = OTHER; note = bicyclic nucleic acid (BNA)
  modified_base 9: mod_base = OTHER; note = bicyclic nucleic acid (BNA)
  modified_base 22: mod_base = OTHER; note = bicyclic nucleic acid (BNA)
  source 1..22: mol_type = other RNA
tcaaggaagatggcatttctag

SEQ ID NO: 12603 - RNA, 22 nt, synthetic construct
  misc_feature 1..22: note = Description of Artificial Sequence: Synthetic Antisense oligonucleotide
  modified_base 2: mod_base = OTHER; note = 5-methyl
  modified_base 14: mod_base = OTHER; note = 5-methyl
  modified_base 19: mod_base = OTHER; note = 5-methyl
  modified_base 14: mod_base = OTHER; note = bicyclic nucleic acid (BNA)
  modified_base 19: mod_base = OTHER; note = bicyclic nucleic acid (BNA)
  modified_base 22: mod_base = OTHER; note = bicyclic nucleic acid (BNA)
  source 1..22: mol_type = other RNA
tcaaggaagatggcatttctag

SEQ ID NO: 12604 - RNA, 22 nt, synthetic construct
  misc_feature 1..22: note = Description of Artificial Sequence: Synthetic Antisense oligonucleotide
  modified_base 2: mod_base = OTHER; note = 5-methyl
  modified_base 14: mod_base = OTHER; note = 5-methyl
  modified_base 19: mod_base = OTHER; note = 5-methyl
  modified_base 9: mod_base = OTHER; note = bicyclic nucleic acid (BNA)
  modified_base 19: mod_base = OTHER; note = bicyclic nucleic acid (BNA)
  modified_base 22: mod_base = OTHER; note = bicyclic nucleic acid (BNA)
  source 1..22: mol_type = other RNA
tcaaggaagatggcatttctag

SEQ ID NO: 12605 - DNA, 18 bp, synthetic construct
  misc_feature 1..18: note = Description of Artificial Sequence: Synthetic Antisense oligonucleotide
  modified_base 2: mod_base = OTHER; note = bicyclic nucleic acid (BNA)
  modified_base 18: mod_base = OTHER; note = bicyclic nucleic acid (BNA)
  source 1..18: mol_type = other DNA
ggtaagttctgtccaagc

SEQ ID NO: 12606 - DNA, 18 bp, synthetic construct
  misc_feature 1..18: note = Description of Artificial Sequence: Synthetic Antisense oligonucleotide
  modified_base 9: mod_base = OTHER; note = bicyclic nucleic acid (BNA)
  modified_base 18: mod_base = OTHER; note = bicyclic nucleic acid (BNA)
  source 1..18: mol_type = other DNA
ggtaagttctgtccaagc

SEQ ID NO: 12607 - DNA, 18 bp, synthetic construct
  misc_feature 1..18: note = Description of Artificial Sequence: Synthetic Antisense oligonucleotide
  modified_base 11: mod_base = OTHER; note = bicyclic nucleic acid (BNA)
  modified_base 18: mod_base = OTHER; note = bicyclic nucleic acid (BNA)
  source 1..18: mol_type = other DNA
ggtaagttctgtccaagc

SEQ ID NO: 12608 - DNA, 18 bp, synthetic construct
  misc_feature 1..18: note = Description of Artificial Sequence: Synthetic Antisense oligonucleotide
  modified_base 6: mod_base = OTHER; note = bicyclic nucleic acid (BNA)
  modified_base 18: mod_base = OTHER; note = bicyclic nucleic acid (BNA)
  source 1..18: mol_type = other DNA
ggtaagttctgtccaagc

SEQ ID NO: 12609 - DNA, 18 bp, synthetic construct
  misc_feature 1..18: note = Description of Artificial Sequence: Synthetic Antisense oligonucleotide
  modified_base 13: mod_base = OTHER; note = bicyclic nucleic acid (BNA)
  modified_base 18: mod_base = OTHER; note = bicyclic nucleic acid (BNA)
  source 1..18: mol_type = other DNA
ggtaagttctgtccaagc

SEQ ID NO: 12610 - DNA, 18 bp, synthetic construct
  misc_feature 1..18: note = Description of Artificial Sequence: Synthetic Antisense oligonucleotide
  modified_base 14: mod_base = OTHER; note = bicyclic nucleic acid (BNA)
  modified_base 18: mod_base = OTHER; note = bicyclic nucleic acid (BNA)
  source 1..18: mol_type = other DNA
ggtaagttctgtccaagc

SEQ ID NO: 12611 - DNA, 18 bp, synthetic construct
  misc_feature 1..18: note = Description of Artificial Sequence: Synthetic Antisense oligonucleotide
  modified_base 16: mod_base = OTHER; note = bicyclic nucleic acid (BNA)
  modified_base 18: mod_base = OTHER; note = bicyclic nucleic acid (BNA)
  source 1..18: mol_type = other DNA
gtaagttctgtccaagcc

SEQ ID NO: 12612 - DNA, 18 bp, synthetic construct
  misc_feature 1..18: note = Description of Artificial Sequence: Synthetic Antisense oligonucleotide
  modified_base 10: mod_base = OTHER; note = bicyclic nucleic acid (BNA)
  modified_base 18: mod_base = OTHER; note = bicyclic nucleic acid (BNA)
  source 1..18: mol_type = other DNA
gtaagttctgtccaagcc

SEQ ID NO: 12613 - DNA, 18 bp, synthetic construct
  misc_feature 1..18: note = Description of Artificial Sequence: Synthetic Antisense oligonucleotide
  modified_base 5: mod_base = OTHER; note = bicyclic nucleic acid (BNA)
  modified_base 18: mod_base = OTHER; note = bicyclic nucleic acid (BNA)
  source 1..18: mol_type = other DNA
gtaagttctgtccaagcc

SEQ ID NO: 12614 - DNA, 18 bp, synthetic construct
  misc_feature 1..18: note = Description of Artificial Sequence: Synthetic Antisense oligonucleotide
  modified_base 12: mod_base = OTHER; note = bicyclic nucleic acid (BNA)
  modified_base 18: mod_base = OTHER; note = bicyclic nucleic acid (BNA)
  source 1..18: mol_type = other DNA
gtaagttctgtccaagcc

SEQ ID NO: 12615 - DNA, 18 bp, synthetic construct
  misc_feature 1..18: note = Description of Artificial Sequence: Synthetic Antisense oligonucleotide
  modified_base 13: mod_base = OTHER; note = bicyclic nucleic acid (BNA)
  modified_base 18: mod_base = OTHER; note = bicyclic nucleic acid (BNA)
  source 1..18: mol_type = other DNA
gtaagttctgtccaagcc

SEQ ID NO: 12616 - DNA, 18 bp, synthetic construct
  misc_feature 1..18: note = Description of Artificial Sequence: Synthetic Antisense oligonucleotide
  modified_base 8: mod_base = OTHER; note = bicyclic nucleic acid (BNA)
  modified_base 18: mod_base = OTHER; note = bicyclic nucleic acid (BNA)
  source 1..18: mol_type = other DNA
gtaagttctgtccaagcc

SEQ ID NO: 12617 - DNA, 18 bp, synthetic construct
  misc_feature 1..18: note = Description of Artificial Sequence: Synthetic Antisense oligonucleotide
  modified_base 2: mod_base = OTHER; note = bicyclic nucleic acid (BNA)
  modified_base 18: mod_base = OTHER; note = bicyclic nucleic acid (BNA)
  source 1..18: mol_type = other DNA
agtcggtaagttctgtcc

SEQ ID NO: 12618 - DNA, 18 bp, synthetic construct
  misc_feature 1..18: note = Description of Artificial Sequence: Synthetic Antisense oligonucleotide
  modified_base 4: mod_base = OTHER; note = bicyclic nucleic acid (BNA)
  modified_base 18: mod_base = OTHER; note = bicyclic nucleic acid (BNA)
  source 1..18: mol_type = other DNA
agtcggtaagttctgtcc

SEQ ID NO: 12619 - DNA, 18 bp, synthetic construct
  misc_feature 1..18: note = Description of Artificial Sequence: Synthetic Antisense oligonucleotide
  modified_base 10: mod_base = OTHER; note = bicyclic nucleic acid (BNA)
  modified_base 18: mod_base = OTHER; note = bicyclic nucleic acid (BNA)
  source 1..18: mol_type = other DNA
agtcggtaagttctgtcc

SEQ ID NO: 12620 - DNA, 18 bp, synthetic construct
  misc_feature 1..18: note = Description of Artificial Sequence: Synthetic Antisense oligonucleotide
  modified_base 5: mod_base = OTHER; note = bicyclic nucleic acid (BNA)
  modified_base 18: mod_base = OTHER; note = bicyclic nucleic acid (BNA)
  source 1..18: mol_type = other DNA
agtcggtaagttctgtcc

SEQ ID NO: 12621 - DNA, 18 bp, synthetic construct
  misc_feature 1..18: note = Description of Artificial Sequence: Synthetic Antisense oligonucleotide
  modified_base 6: mod_base = OTHER; note = bicyclic nucleic acid (BNA)
  modified_base 18: mod_base = OTHER; note = bicyclic nucleic acid (BNA)
  source 1..18: mol_type = other DNA
agtcggtaagttctgtcc

SEQ ID NO: 12622 - DNA, 18 bp, synthetic construct
  misc_feature 1..18: note = Description of Artificial Sequence: Synthetic Antisense oligonucleotide
  modified_base 13: mod_base = OTHER; note = bicyclic nucleic acid (BNA)
  modified_base 18: mod_base = OTHER; note = bicyclic nucleic acid (BNA)
  source 1..18: mol_type = other DNA
agtcggtaagttctgtcc

SEQ ID NO: 12623 - DNA, 18 bp, synthetic construct
  misc_feature 1..18: note = Description of Artificial Sequence: Synthetic Antisense oligonucleotide
  modified_base 15: mod_base = OTHER; note = bicyclic nucleic acid (BNA)
  modified_base 18: mod_base = OTHER; note = bicyclic nucleic acid (BNA)
  source 1..18: mol_type = other DNA
agtcggtaagttctgtcc

SEQ ID NO: 12624 - DNA, 18 bp, synthetic construct
  misc_feature 1..18: note = Description of Artificial Sequence: Synthetic Antisense oligonucleotide
  modified_base 3: mod_base = OTHER; note = bicyclic nucleic acid (BNA)
  modified_base 18: mod_base = OTHER; note = bicyclic nucleic acid (BNA)
  source 1..18: mol_type = other DNA
ctgtccaagcccggttga

SEQ ID NO: 12625 - DNA, 18 bp, synthetic construct
  misc_feature 1..18: note = Description of Artificial Sequence: Synthetic Antisense oligonucleotide
  modified_base 9: mod_base = OTHER; note = bicyclic nucleic acid (BNA)
  modified_base 18: mod_base = OTHER; note = bicyclic nucleic acid (BNA)
  source 1..18: mol_type = other DNA
ctgtccaagcccggttga

SEQ ID NO: 12626 - DNA, 18 bp, synthetic construct
  misc_feature 1..18: note = Description of Artificial Sequence: Synthetic Antisense oligonucleotide
  modified_base 10: mod_base = OTHER; note = bicyclic nucleic acid (BNA)
  modified_base 18: mod_base = OTHER; note = bicyclic nucleic acid (BNA)
  source 1..18: mol_type = other DNA
ctgtccaagcccggttga

SEQ ID NO: 12627 - DNA, 18 bp, synthetic construct
  misc_feature 1..18: note = Description of Artificial Sequence: Synthetic Antisense oligonucleotide
  modified_base 5: mod_base = OTHER; note = bicyclic nucleic acid (BNA)
  modified_base 18: mod_base = OTHER; note = bicyclic nucleic acid (BNA)
  source 1..18: mol_type = other DNA
ctgtccaagcccggttga

SEQ ID NO: 12628 - DNA, 18 bp, synthetic construct
  misc_feature 1..18: note = Description of Artificial Sequence: Synthetic Antisense oligonucleotide
  modified_base 11: mod_base = OTHER; note = bicyclic nucleic acid (BNA)
  modified_base 18: mod_base = OTHER; note = bicyclic nucleic acid (BNA)
  source 1..18: mol_type = other DNA
ctgtccaagcccggttga

SEQ ID NO: 12629 - DNA, 18 bp, synthetic construct
  misc_feature 1..18: note = Description of Artificial Sequence: Synthetic Antisense oligonucleotide
  modified_base 6: mod_base = OTHER; note = bicyclic nucleic acid (BNA)
  modified_base 18: mod_base = OTHER; note = bicyclic nucleic acid (BNA)
  source 1..18: mol_type = other DNA
ctgtccaagcccggttga

SEQ ID NO: 12630 - DNA, 18 bp, synthetic construct
  misc_feature 1..18: note = Description of Artificial Sequence: Synthetic Antisense oligonucleotide
  modified_base 12: mod_base = OTHER; note = bicyclic nucleic acid (BNA)
  modified_base 18: mod_base = OTHER; note = bicyclic nucleic acid (BNA)
  source 1..18: mol_type = other DNA
ctgtccaagcccggttga

SEQ ID NO: 12631 - DNA, 18 bp, synthetic construct
  misc_feature 1..18: note = Description of Artificial Sequence: Synthetic Antisense oligonucleotide
  modified_base 13: mod_base = OTHER; note = bicyclic nucleic acid (BNA)
  modified_base 18: mod_base = OTHER; note = bicyclic nucleic acid (BNA)
  source 1..18: mol_type = other DNA
ctgtccaagcccggttga

SEQ ID NO: 12632 - DNA, 18 bp, synthetic construct
  misc_feature 1..18: note = Description of Artificial Sequence: Synthetic Antisense oligonucleotide
  modified_base 14: mod_base = OTHER; note = bicyclic nucleic acid (BNA)
  modified_base 18: mod_base = OTHER; note = bicyclic nucleic acid (BNA)
  source 1..18: mol_type = other DNA
ctgtccaagcccggttga

SEQ ID NO: 12633 - DNA, 18 bp, synthetic construct
  misc_feature 1..18: note = Description of Artificial Sequence: Synthetic Antisense oligonucleotide
  modified_base 6: mod_base = OTHER; note = bicyclic nucleic acid (BNA)
  modified_base 11: mod_base = OTHER; note = bicyclic nucleic acid (BNA)
  modified_base 18: mod_base = OTHER; note = bicyclic nucleic acid (BNA)
  source 1..18: mol_type = other DNA
ggtaagttctgtccaagc

SEQ ID NO: 12634 - DNA, 18 bp, synthetic construct
  misc_feature 1..18: note = Description of Artificial Sequence: Synthetic Antisense oligonucleotide
  modified_base 9: mod_base = OTHER; note = bicyclic nucleic acid (BNA)
  modified_base 14: mod_base = OTHER; note = bicyclic nucleic acid (BNA)
  modified_base 18: mod_base = OTHER; note = bicyclic nucleic acid (BNA)
  source 1..18: mol_type = other DNA
ggtaagttctgtccaagc

SEQ ID NO: 12635 - DNA, 18 bp, synthetic construct
  misc_feature 1..18: note = Description of Artificial Sequence: Synthetic Antisense oligonucleotide
  modified_base 2: mod_base = OTHER; note = bicyclic nucleic acid (BNA)
  modified_base 13: mod_base = OTHER; note = bicyclic nucleic acid (BNA)
  modified_base 18: mod_base = OTHER; note = bicyclic nucleic acid (BNA)
  source 1..18: mol_type = other DNA
ggtaagttctgtccaagc

SEQ ID NO: 12636 - DNA, 18 bp, synthetic construct
  misc_feature 1..18: note = Description of Artificial Sequence: Synthetic Antisense oligonucleotide
  modified_base 9: mod_base = OTHER; note = bicyclic nucleic acid (BNA)
  modified_base 13: mod_base = OTHER; note = bicyclic nucleic acid (BNA)
  modified_base 18: mod_base = OTHER; note = bicyclic nucleic acid (BNA)
  source 1..18: mol_type = other DNA
ggtaagttctgtccaagc

SEQ ID NO: 12637 - DNA, 18 bp, synthetic construct
  misc_feature 1..18: note = Description of Artificial Sequence: Synthetic Antisense oligonucleotide
  modified_base 13..14: mod_base = OTHER; note = bicyclic nucleic acid (BNA)
  modified_base 18: mod_base = OTHER; note = bicyclic nucleic acid (BNA)
  source 1..18: mol_type = other DNA
ggtaagttctgtccaagc

SEQ ID NO: 12638 - DNA, 18 bp, synthetic construct
  misc_feature 1..18: note = Description of Artificial Sequence: Synthetic Antisense oligonucleotide
  modified_base 2: mod_base = OTHER; note = bicyclic nucleic acid (BNA)
  modified_base 14: mod_base = OTHER; note = bicyclic nucleic acid (BNA)
  modified_base 18: mod_base = OTHER; note = bicyclic nucleic acid (BNA)
  source 1..18: mol_type = other DNA
ggtaagttctgtccaagc

SEQ ID NO: 12639 - DNA, 18 bp, synthetic construct
  misc_feature 1..18: note = Description of Artificial Sequence: Synthetic Antisense oligonucleotide
  modified_base 11: mod_base = OTHER; note = bicyclic nucleic acid (BNA)
  modified_base 14: mod_base = OTHER; note = bicyclic nucleic acid (BNA)
  modified_base 18: mod_base = OTHER; note = bicyclic nucleic acid (BNA)
  source 1..18: mol_type = other DNA
ggtaagttctgtccaagc

SEQ ID NO: 12640 - DNA, 18 bp, synthetic construct
  misc_feature 1..18: note = Description of Artificial Sequence: Synthetic Antisense oligonucleotide
  modified_base 6: mod_base = OTHER; note = bicyclic nucleic acid (BNA)
  modified_base 13: mod_base = OTHER; note = bicyclic nucleic acid (BNA)
  modified_base 18: mod_base = OTHER; note = bicyclic nucleic acid (BNA)
  source 1..18: mol_type = other DNA
ggtaagttctgtccaagc

SEQ ID NO: 12641 - DNA, 18 bp, synthetic construct
  misc_feature 1..18: note = Description of Artificial Sequence: Synthetic Antisense oligonucleotide
  modified_base 6: mod_base = OTHER; note = bicyclic nucleic acid (BNA)
  modified_base 14: mod_base = OTHER; note = bicyclic nucleic acid (BNA)
  modified_base 18: mod_base = OTHER; note = bicyclic nucleic acid (BNA)
  source 1..18: mol_type = other DNA
ggtaagttctgtccaagc

SEQ ID NO: 12642 - DNA, 18 bp, synthetic construct
  misc_feature 1..18: note = Description of Artificial Sequence: Synthetic Antisense oligonucleotide
  modified_base 9: mod_base = OTHER; note = bicyclic nucleic acid (BNA)
  modified_base 11: mod_base = OTHER; note = bicyclic nucleic acid (BNA)
  modified_base 18: mod_base = OTHER; note = bicyclic nucleic acid (BNA)
  source 1..18: mol_type = other DNA
ggtaagttctgtccaagc

SEQ ID NO: 12643 - DNA, 18 bp, synthetic construct
  misc_feature 1..18: note = Description of Artificial Sequence: Synthetic Antisense oligonucleotide
  modified_base 11: mod_base = OTHER; note = bicyclic nucleic acid (BNA)
  modified_base 13: mod_base = OTHER; note = bicyclic nucleic acid (BNA)
  modified_base 18: mod_base = OTHER; note = bicyclic nucleic acid (BNA)
  source 1..18: mol_type = other DNA
ggtaagttctgtccaagc

SEQ ID NO: 12644 - DNA, 18 bp, synthetic construct
  misc_feature 1..18: note = Description of Artificial Sequence: Synthetic Antisense oligonucleotide
  modified_base 2: mod_base = OTHER; note = bicyclic nucleic acid (BNA)
  modified_base 6: mod_base = OTHER; note = bicyclic nucleic acid (BNA)
  modified_base 18: mod_base = OTHER; note = bicyclic nucleic acid (BNA)
  source 1..18: mol_type = other DNA
ggtaagttctgtccaagc

SEQ ID NO: 12645 - DNA, 18 bp, synthetic construct
  misc_feature 1..18: note = Description of Artificial Sequence: Synthetic Antisense oligonucleotide
  modified_base 2: mod_base = OTHER; note = bicyclic nucleic acid (BNA)
  modified_base 9: mod_base = OTHER; note = bicyclic nucleic acid (BNA)
  modified_base 18: mod_base = OTHER; note = bicyclic nucleic acid (BNA)
  source 1..18: mol_type = other DNA
ggtaagttctgtccaagc

SEQ ID NO: 12646 - DNA, 18 bp, synthetic construct
  misc_feature 1..18: note = Description of Artificial Sequence: Synthetic Antisense oligonucleotide
  modified_base 2: mod_base = OTHER; note = bicyclic nucleic acid (BNA)
  modified_base 11: mod_base = OTHER; note = bicyclic nucleic acid (BNA)
  modified_base 18: mod_base = OTHER; note = bicyclic nucleic acid (BNA)
  source 1..18: mol_type = other DNA
ggtaagttctgtccaagc

SEQ ID NO: 12647 - DNA, 18 bp, synthetic construct
  misc_feature 1..18: note = Description of Artificial Sequence: Synthetic Antisense oligonucleotide
  modified_base 6: mod_base = OTHER; note = bicyclic nucleic acid (BNA)
  modified_base 9: mod_base = OTHER; note = bicyclic nucleic acid (BNA)
  modified_base 18: mod_base = OTHER; note = bicyclic nucleic acid (BNA)
  source 1..18: mol_type = other DNA
ggtaagttctgtccaagc

SEQ ID NO: 12648 - DNA, 18 bp, synthetic construct
  misc_feature 1..18: note = Description of Artificial Sequence: Synthetic Antisense oligonucleotide
  modified_base 5: mod_base = OTHER; note = bicyclic nucleic acid (BNA)
  modified_base 8: mod_base = OTHER; note = bicyclic nucleic acid (BNA)
  modified_base 18: mod_base = OTHER; note = bicyclic nucleic acid (BNA)
  source 1..18: mol_type = other DNA
gtaagttctgtccaagcc

SEQ ID NO: 12649 - DNA, 18 bp, synthetic construct
  misc_feature 1..18: note = Description of Artificial Sequence: Synthetic Antisense oligonucleotide
  modified_base 13: mod_base = OTHER; note = bicyclic nucleic acid (BNA)
  modified_base 16: mod_base = OTHER; note = bicyclic nucleic acid (BNA)
  modified_base 18: mod_base = OTHER; note = bicyclic nucleic acid (BNA)
  source 1..18: mol_type = other DNA
gtaagttctgtccaagcc

SEQ ID NO: 12650 - DNA, 18 bp, synthetic construct
  misc_feature 1..18: note = Description of Artificial Sequence: Synthetic Antisense oligonucleotide
  modified_base 5: mod_base = OTHER; note = bicyclic nucleic acid (BNA)
  modified_base 10: mod_base = OTHER; note = bicyclic nucleic acid (BNA)
  modified_base 18: mod_base = OTHER; note = bicyclic nucleic acid (BNA)
  source 1..18: mol_type = other DNA
gtaagttctgtccaagcc

SEQ ID NO: 12651 - DNA, 18 bp, synthetic construct
  misc_feature 1..18: note = Description of Artificial Sequence: Synthetic Antisense oligonucleotide
  modified_base 8: mod_base = OTHER; note = bicyclic nucleic acid (BNA)
  modified_base 16: mod_base = OTHER; note = bicyclic nucleic acid (BNA)
  modified_base 18: mod_base = OTHER; note = bicyclic nucleic acid (BNA)
  source 1..18: mol_type = other DNA
gtaagttctgtccaagcc

SEQ ID NO: 12652 - DNA, 18 bp, synthetic construct
  misc_feature 1..18: note = Description of Artificial Sequence: Synthetic Antisense oligonucleotide
  modified_base 10: mod_base = OTHER; note = bicyclic nucleic acid (BNA)
  modified_base 16: mod_base = OTHER; note = bicyclic nucleic acid (BNA)
  modified_base 18: mod_base = OTHER; note = bicyclic nucleic acid (BNA)
  source 1..18: mol_type = other DNA
gtaagttctgtccaagcc

SEQ ID NO: 12653 - DNA, 18 bp, synthetic construct
  misc_feature 1..18: note = Description of Artificial Sequence: Synthetic Antisense oligonucleotide
  modified_base 8: mod_base = OTHER; note = bicyclic nucleic acid (BNA)
  modified_base 13: mod_base = OTHER; note = bicyclic nucleic acid (BNA)
  modified_base 18: mod_base = OTHER; note = bicyclic nucleic acid (BNA)
  source 1..18: mol_type = other DNA
gtaagttctgtccaagcc

SEQ ID NO: 12654 - DNA, 18 bp, synthetic construct
  misc_feature 1..18: note = Description of Artificial Sequence: Synthetic Antisense oligonucleotide
  modified_base 5: mod_base = OTHER; note = bicyclic nucleic acid (BNA)
  modified_base 16: mod_base = OTHER; note = bicyclic nucleic acid (BNA)
  modified_base 18: mod_base = OTHER; note = bicyclic nucleic acid (BNA)
  source 1..18: mol_type = other DNA
gtaagttctgtccaagcc

SEQ ID NO: 12655 - DNA, 18 bp, synthetic construct
  misc_feature 1..18: note = Description of Artificial Sequence: Synthetic Antisense oligonucleotide
  modified_base 10: mod_base = OTHER; note = bicyclic nucleic acid (BNA)
  modified_base 13: mod_base = OTHER; note = bicyclic nucleic acid (BNA)
  modified_base 18: mod_base = OTHER; note = bicyclic nucleic acid (BNA)
  source 1..18: mol_type = other DNA
gtaagttctgtccaagcc

SEQ ID NO: 12656 - DNA, 18 bp, synthetic construct
  misc_feature 1..18: note = Description of Artificial Sequence: Synthetic Antisense oligonucleotide
  modified_base 5: mod_base = OTHER; note = bicyclic nucleic acid (BNA)
  modified_base 13: mod_base = OTHER; note = bicyclic nucleic acid (BNA)
  modified_base 18: mod_base = OTHER; note = bicyclic nucleic acid (BNA)
  source 1..18: mol_type = other DNA
gtaagttctgtccaagcc

SEQ ID NO: 12657 - DNA, 18 bp, synthetic construct
  misc_feature 1..18: note = Description of Artificial Sequence: Synthetic Antisense oligonucleotide
  modified_base 10: mod_base = OTHER; note = bicyclic nucleic acid (BNA)
  modified_base 12: mod_base = OTHER; note = bicyclic nucleic acid (BNA)
  modified_base 18: mod_base = OTHER; note = bicyclic nucleic acid (BNA)
  source 1..18: mol_type = other DNA
gtaagttctgtccaagcc

SEQ ID NO: 12658 - DNA, 18 bp, synthetic construct
  misc_feature 1..18: note = Description of Artificial Sequence: Synthetic Antisense oligonucleotide
  modified_base 8: mod_base = OTHER; note = bicyclic nucleic acid (BNA)
  modified_base 12: mod_base = OTHER; note = bicyclic nucleic acid (BNA)
  modified_base 18: mod_base = OTHER; note = bicyclic nucleic acid (BNA)
  source 1..18: mol_type = other DNA
gtaagttctgtccaagcc

SEQ ID NO: 12659 - DNA, 18 bp, synthetic construct
  misc_feature 1..18: note = Description of Artificial Sequence: Synthetic Antisense oligonucleotide
  modified_base 12: mod_base = OTHER; note = bicyclic nucleic acid (BNA)
  modified_base 16: mod_base = OTHER; note = bicyclic nucleic acid (BNA)
  modified_base 18: mod_base = OTHER; note = bicyclic nucleic acid (BNA)
  source 1..18: mol_type = other DNA
gtaagttctgtccaagcc

SEQ ID NO: 12660 - DNA, 18 bp, synthetic construct
  misc_feature 1..18: note = Description of Artificial Sequence: Synthetic Antisense oligonucleotide
  modified_base 12..13: mod_base = OTHER; note = bicyclic nucleic acid (BNA)
  modified_base 18: mod_base = OTHER; note = bicyclic nucleic acid (BNA)
  source 1..18: mol_type = other DNA
gtaagttctgtccaagcc

SEQ ID NO: 12661 - DNA, 18 bp, synthetic construct
  misc_feature 1..18: note = Description of Artificial Sequence: Synthetic Antisense oligonucleotide
  modified_base 5: mod_base = OTHER; note = bicyclic nucleic acid (BNA)
  modified_base 12: mod_base = OTHER; note = bicyclic nucleic acid (BNA)
  modified_base 18: mod_base = OTHER; note = bicyclic nucleic acid (BNA)
  source 1..18: mol_type = other DNA
gtaagttctgtccaagcc

SEQ ID NO: 12662 - DNA, 18 bp, synthetic construct
  misc_feature 1..18: note = Description of Artificial Sequence: Synthetic Antisense oligonucleotide
  modified_base 8: mod_base = OTHER; note = bicyclic nucleic acid (BNA)
  modified_base 10: mod_base = OTHER; note = bicyclic nucleic acid (BNA)
  modified_base 18: mod_base = OTHER; note = bicyclic nucleic acid (BNA)
  source 1..18: mol_type = other DNA
gtaagttctgtccaagcc

SEQ ID NO: 12663 - DNA, 18 bp, synthetic construct
  misc_feature 1..18: note = Description of Artificial Sequence: Synthetic Antisense oligonucleotide
  modified_base 6: mod_base = OTHER; note = bicyclic nucleic acid (BNA)
  modified_base 10: mod_base = OTHER; note = bicyclic nucleic acid (BNA)
  modified_base 18: mod_base = OTHER; note = bicyclic nucleic acid (BNA)
  source 1..18: mol_type = other DNA
agtcggtaagttctgtcc

SEQ ID NO: 12664 - DNA, 18 bp, synthetic construct
  misc_feature 1..18: note = Description of Artificial Sequence: Synthetic Antisense oligonucleotide
  modified_base 2: mod_base = OTHER; note = bicyclic nucleic acid (BNA)
  modified_base 4: mod_base = OTHER; note = bicyclic nucleic acid (BNA)
  modified_base 18: mod_base = OTHER; note = bicyclic nucleic acid (BNA)
  source 1..18: mol_type = other DNA
agtcggtaagttctgtcc

SEQ ID NO: 12665 - DNA, 18 bp, synthetic construct
  misc_feature 1..18: note = Description of Artificial Sequence: Synthetic Antisense oligonucleotide
  modified_base 5: mod_base = OTHER; note = bicyclic nucleic acid (BNA)
  modified_base 13: mod_base = OTHER; note = bicyclic nucleic acid (BNA)
  modified_base 18: mod_base = OTHER; note = bicyclic nucleic acid (BNA)
  source 1..18: mol_type = other DNA
agtcggtaagttctgtcc

SEQ ID NO: 12666 - DNA, 18 bp, synthetic construct
  misc_feature 1..18: note = Description of Artificial Sequence: Synthetic Antisense oligonucleotide
  modified_base 4: mod_base = OTHER; note = bicyclic nucleic acid (BNA)
  modified_base 15: mod_base = OTHER; note = bicyclic nucleic acid (BNA)
  modified_base 18: mod_base = OTHER; note = bicyclic nucleic acid (BNA)
  source 1..18: mol_type = other DNA
agtcggtaagttctgtcc

SEQ ID NO: 12667 - DNA, 18 bp, synthetic construct
  misc_feature 1..18: note = Description of Artificial Sequence: Synthetic Antisense oligonucleotide
  modified_base 5: mod_base = OTHER; note = bicyclic nucleic acid (BNA)
  modified_base 10: mod_base = OTHER; note = bicyclic nucleic acid (BNA)
  modified_base 18: mod_base = OTHER; note = bicyclic nucleic acid (BNA)
  source 1..18: mol_type = other DNA
agtcggtaagttctgtcc

SEQ ID NO: 12668 - DNA, 18 bp, synthetic construct
  misc_feature 1..18: note = Description of Artificial Sequence: Synthetic Antisense oligonucleotide
  modified_base 6: mod_base = OTHER; note = bicyclic nucleic acid (BNA)
  modified_base 13: mod_base = OTHER; note = bicyclic nucleic acid (BNA)
  modified_base 18: mod_base = OTHER; note = bicyclic nucleic acid (BNA)
  source 1..18: mol_type = other DNA
agtcggtaagttctgtcc

SEQ ID NO: 12669 - DNA, 18 bp, synthetic construct
  misc_feature 1..18: note = Description of Artificial Sequence: Synthetic Antisense oligonucleotide
  modified_base 2: mod_base = OTHER; note = bicyclic nucleic acid (BNA)
  modified_base 15: mod_base = OTHER; note = bicyclic nucleic acid (BNA)
  modified_base 18: mod_base = OTHER; note = bicyclic nucleic acid (BNA)
  source 1..18: mol_type = other DNA
agtcggtaagttctgtcc

SEQ ID NO: 12670 - DNA, 18 bp, synthetic construct
  misc_feature 1..18: note = Description of Artificial Sequence: Synthetic Antisense oligonucleotide
  modified_base 2: mod_base = OTHER; note = bicyclic nucleic acid (BNA)
  modified_base 6: mod_base = OTHER; note = bicyclic nucleic acid (BNA)
  modified_base 18: mod_base = OTHER; note = bicyclic nucleic acid (BNA)
  source 1..18: mol_type = other DNA
agtcggtaagttctgtcc

SEQ ID NO: 12671 - DNA, 18 bp, synthetic construct
  misc_feature 1..18: note = Description of Artificial Sequence: Synthetic Antisense oligonucleotide
  modified_base 10: mod_base = OTHER; note = bicyclic nucleic acid (BNA)
  modified_base 15: mod_base = OTHER; note = bicyclic nucleic acid (BNA)
  modified_base 18: mod_base = OTHER; note = bicyclic nucleic acid (BNA)
  source 1..18: mol_type = other DNA
agtcggtaagttctgtcc

SEQ ID NO: 12672 - DNA, 18 bp, synthetic construct
  misc_feature 1..18: note = Description of Artificial Sequence: Synthetic Antisense oligonucleotide
  modified_base 13: mod_base = OTHER; note = bicyclic nucleic acid (BNA)
  modified_base 15: mod_base = OTHER; note = bicyclic nucleic acid (BNA)
  modified_base 18: mod_base = OTHER; note = bicyclic nucleic acid (BNA)
  source 1..18: mol_type = other DNA
agtcggtaagttctgtcc

SEQ ID NO: 12673 - DNA, 18 bp, synthetic construct
  misc_feature 1..18: note = Description of Artificial Sequence: Synthetic Antisense oligonucleotide
  modified_base 5..6: mod_base = OTHER; note = bicyclic nucleic acid (BNA)
  modified_base 18: mod_base = OTHER; note = bicyclic nucleic acid (BNA)
  source 1..18: mol_type = other DNA
agtcggtaagttctgtcc

SEQ ID NO: 12674 - DNA, 18 bp, synthetic construct
  misc_feature 1..18: note = Description of Artificial Sequence: Synthetic Antisense oligonucleotide
  modified_base 5: mod_base = OTHER; note = bicyclic nucleic acid (BNA)
  modified_base 15: mod_base = OTHER; note = bicyclic nucleic acid (BNA)
  modified_base 18: mod_base = OTHER; note = bicyclic nucleic acid (BNA)
  source 1..18: mol_type = other DNA
agtcggtaagttctgtcc

SEQ ID NO: 12675 - DNA, 18 bp, synthetic construct
  misc_feature 1..18: note = Description of Artificial Sequence: Synthetic Antisense oligonucleotide
  modified_base 2: mod_base = OTHER; note = bicyclic nucleic acid (BNA)
  modified_base 5: mod_base = OTHER; note = bicyclic nucleic acid (BNA)
  modified_base 18: mod_base = OTHER; note = bicyclic nucleic acid (BNA)
  source 1..18: mol_type = other DNA
agtcggtaagttctgtcc

SEQ ID NO: 12676 - DNA, 18 bp, synthetic construct
  misc_feature 1..18: note = Description of Artificial Sequence: Synthetic Antisense oligonucleotide
  modified_base 4: mod_base = OTHER; note = bicyclic nucleic acid (BNA)
  modified_base 10: mod_base = OTHER; note = bicyclic nucleic acid (BNA)
  modified_base 18: mod_base = OTHER; note = bicyclic nucleic acid (BNA)
  source 1..18: mol_type = other DNA
agtcggtaagttctgtcc

SEQ ID NO: 12677 - DNA, 18 bp, synthetic construct
  misc_feature 1..18: note = Description of Artificial Sequence: Synthetic Antisense oligonucleotide
  modified_base 2: mod_base = OTHER; note = bicyclic nucleic acid (BNA)
  modified_base 10: mod_base = OTHER; note = bicyclic nucleic acid (BNA)
  modified_base 18: mod_base = OTHER; note = bicyclic nucleic acid (BNA)
  source 1..18: mol_type = other DNA
agtcggtaagttctgtcc

SEQ ID NO: 12678 - DNA, 18 bp, synthetic construct
  misc_feature 1..18: note = Description of Artificial Sequence: Synthetic Antisense oligonucleotide
  modified_base 4: mod_base = OTHER; note = bicyclic nucleic acid (BNA)
  modified_base 6: mod_base = OTHER; note = bicyclic nucleic acid (BNA)
  modified_base 18: mod_base = OTHER; note = bicyclic nucleic acid (BNA)
  source 1..18: mol_type = other DNA
agtcggtaagttctgtcc

SEQ ID NO: 12679 - DNA, 18 bp, synthetic construct
  misc_feature 1..18: note = Description of Artificial Sequence: Synthetic Antisense oligonucleotide
  modified_base 4: mod_base = OTHER; note = bicyclic nucleic acid (BNA)
  modified_base 13: mod_base = OTHER; note = bicyclic nucleic acid (BNA)
  modified_base 18: mod_base = OTHER; note = bicyclic nucleic acid (BNA)
  source 1..18: mol_type = other DNA
agtcggtaagttctgtcc

SEQ ID NO: 12680 - DNA, 18 bp, synthetic construct
  misc_feature 1..18: note = Description of Artificial Sequence: Synthetic Antisense oligonucleotide
  modified_base 2: mod_base = OTHER; note = bicyclic nucleic acid (BNA)
  modified_base 13: mod_base = OTHER; note = bicyclic nucleic acid (BNA)
  modified_base 18: mod_base = OTHER; note = bicyclic nucleic acid (BNA)
  source 1..18: mol_type = other DNA
agtcggtaagttctgtcc

SEQ ID NO: 12681 - DNA, 18 bp, synthetic construct
  misc_feature 1..18: note = Description of Artificial Sequence: Synthetic Antisense oligonucleotide
  modified_base 6: mod_base = OTHER; note = bicyclic nucleic acid (BNA)
  modified_base 15: mod_base = OTHER; note = bicyclic nucleic acid (BNA)
  modified_base 18: mod_base = OTHER; note = bicyclic nucleic acid (BNA)
  source 1..18: mol_type = other DNA
agtcggtaagttctgtcc

SEQ ID NO: 12682 - DNA, 18 bp, synthetic construct
  misc_feature 1..18: note = Description of Artificial Sequence: Synthetic Antisense oligonucleotide
  modified_base 4..5: mod_base = OTHER; note = bicyclic nucleic acid (BNA)
  modified_base 18: mod_base = OTHER; note = bicyclic nucleic acid (BNA)
  source 1..18: mol_type = other DNA
agtcggtaagttctgtcc

SEQ ID NO: 12683 - DNA, 18 bp, synthetic construct
  misc_feature 1..18: note = Description of Artificial Sequence: Synthetic Antisense oligonucleotide
  modified_base 10: mod_base = OTHER; note = bicyclic nucleic acid (BNA)
  modified_base 13: mod_base = OTHER; note = bicyclic nucleic acid (BNA)
  modified_base 18: mod_base = OTHER; note = bicyclic nucleic acid (BNA)
  source 1..18: mol_type = other DNA
agtcggtaagttctgtcc

SEQ ID NO: 12684 - DNA, 18 bp, synthetic construct
  misc_feature 1..18: note = Description of Artificial Sequence: Synthetic Antisense oligonucleotide
  modified_base 6: mod_base = OTHER; note = bicyclic nucleic acid (BNA)
  modified_base 10: mod_base = OTHER; note = bicyclic nucleic acid (BNA)
  modified_base 18: mod_base = OTHER; note = bicyclic nucleic acid (BNA)
  source 1..18: mol_type = other DNA
ctgtccaagcccggttga

SEQ ID NO: 12685 - DNA, 18 bp, synthetic construct
  misc_feature 1..18: note = Description of Artificial Sequence: Synthetic Antisense oligonucleotide
  modified_base 9: mod_base = OTHER; note = bicyclic nucleic acid (BNA)
  modified_base 14: mod_base = OTHER; note = bicyclic nucleic acid (BNA)
  modified_base 18: mod_base = OTHER; note = bicyclic nucleic acid (BNA)
  source 1..18: mol_type = other DNA
ctgtccaagcccggttga

SEQ ID NO: 12686 - DNA, 18 bp, synthetic construct
  misc_feature 1..18: note = Description of Artificial Sequence: Synthetic Antisense oligonucleotide
  modified_base 11..12: mod_base = OTHER; note = bicyclic nucleic acid (BNA)
  modified_base 18: mod_base = OTHER; note = bicyclic nucleic acid (BNA)
  source 1..18: mol_type = other DNA
ctgtccaagcccggttga

SEQ ID NO: 12687 - DNA, 18 bp, synthetic construct
  misc_feature 1..18: note = Description of Artificial Sequence: Synthetic Antisense oligonucleotide
  modified_base 5: mod_base = OTHER; note = bicyclic nucleic acid (BNA)
  modified_base 9: mod_base = OTHER; note = bicyclic nucleic acid (BNA)
  modified_base 18: mod_base = OTHER; note = bicyclic nucleic acid (BNA)
  source 1..18: mol_type = other DNA
ctgtccaagcccggttga

SEQ ID NO: 12688 - DNA, 18 bp, synthetic construct
  misc_feature 1..18: note = Description of Artificial Sequence: Synthetic Antisense oligonucleotide
  modified_base 3: mod_base = OTHER; note = bicyclic nucleic acid (BNA)
  modified_base 9: mod_base = OTHER; note = bicyclic nucleic acid (BNA)
  modified_base 18: mod_base = OTHER; note = bicyclic nucleic acid (BNA)
  source 1..18: mol_type = other DNA
ctgtccaagcccggttga

SEQ ID NO: 12689 - DNA, 18 bp, synthetic construct
  misc_feature 1..18: note = Description of Artificial Sequence: Synthetic Antisense oligonucleotide
  modified_base 6: mod_base = OTHER; note = bicyclic nucleic acid (BNA)
  modified_base 14: mod_base = OTHER; note = bicyclic nucleic acid (BNA)
  modified_base 18: mod_base = OTHER; note = bicyclic nucleic acid (BNA)
  source 1..18: mol_type = other DNA
ctgtccaagcccggttga

SEQ ID NO: 12690 - DNA, 18 bp, synthetic construct
  misc_feature 1..18: note = Description of Artificial Sequence: Synthetic Antisense oligonucleotide
  modified_base 9..10: mod_base = OTHER; note = bicyclic nucleic acid (BNA)
  modified_base 18: mod_base = OTHER; note = bicyclic nucleic acid (BNA)
  source 1..18: mol_type = other DNA
ctgtccaagcccggttga

SEQ ID NO: 12691 - DNA, 18 bp, synthetic construct
  misc_feature 1..18: note = Description of Artificial Sequence: Synthetic Antisense oligonucleotide
  modified_base 5: mod_base = OTHER; note = bicyclic nucleic acid (BNA)
  modified_base 13: mod_base = OTHER; note = bicyclic nucleic acid (BNA)
  modified_base 18: mod_base = OTHER; note = bicyclic nucleic acid (BNA)
  source 1..18: mol_type = other DNA
ctgtccaagcccggttga

SEQ ID NO: 12692 - DNA, 18 bp, synthetic construct
  misc_feature 1..18: note = Description of Artificial Sequence: Synthetic Antisense oligonucleotide
  modified_base 3: mod_base = OTHER; note = bicyclic nucleic acid (BNA)
  modified_base 13: mod_base = OTHER; note = bicyclic nucleic acid (BNA)
  modified_base 18: mod_base = OTHER; note = bicyclic nucleic acid (BNA)
  source 1..18: mol_type = other DNA
ctgtccaagcccggttga

SEQ ID NO: 12693 - DNA, 18 bp, synthetic construct
  misc_feature 1..18: note = Description of Artificial Sequence: Synthetic Antisense oligonucleotide
  modified_base 3: mod_base = OTHER; note = bicyclic nucleic acid (BNA)
  modified_base 6: mod_base = OTHER; note = bicyclic nucleic acid (BNA)
  modified_base 18: mod_base = OTHER; note = bicyclic nucleic acid (BNA)
  source 1..18: mol_type = other DNA
ctgtccaagcccggttga

SEQ ID NO: 12694 - DNA, 18 bp, synthetic construct
  misc_feature 1..18: note = Description of Artificial Sequence: Synthetic Antisense oligonucleotide
  modified_base 6: mod_base = OTHER; note = bicyclic nucleic acid (BNA)
  modified_base 9: mod_base = OTHER; note = bicyclic nucleic acid (BNA)
  modified_base 18: mod_base = OTHER; note = bicyclic nucleic acid (BNA)
  source 1..18: mol_type = other DNA
ctgtccaagcccggttga

SEQ ID NO: 12695 - DNA, 18 bp, synthetic construct
  misc_feature 1..18: note = Description of Artificial Sequence: Synthetic Antisense oligonucleotide
  modified_base 5: mod_base = OTHER; note = bicyclic nucleic acid (BNA)
  modified_base 10: mod_base = OTHER; note = bicyclic nucleic acid (BNA)
  modified_base 18: mod_base = OTHER; note = bicyclic nucleic acid (BNA)
  source 1..18: mol_type = other DNA
ctgtccaagcccggttga

SEQ ID NO: 12696 - DNA, 18 bp, synthetic construct
  misc_feature 1..18: note = Description of Artificial Sequence: Synthetic Antisense oligonucleotide
  modified_base 3: mod_base = OTHER; note = bicyclic nucleic acid (BNA)
  modified_base 10: mod_base = OTHER; note = bicyclic nucleic acid (BNA)
  modified_base 18: mod_base = OTHER; note = bicyclic nucleic acid (BNA)
  source 1..18: mol_type = other DNA
ctgtccaagcccggttga

SEQ ID NO: 12697 - DNA, 18 bp, synthetic construct
  misc_feature 1..18: note = Description of Artificial Sequence: Synthetic Antisense oligonucleotide
  modified_base 13..14: mod_base = OTHER; note = bicyclic nucleic acid (BNA)
  modified_base 18: mod_base = OTHER; note = bicyclic nucleic acid (BNA)
  source 1..18: mol_type = other DNA
ctgtccaagcccggttga

SEQ ID NO: 12698 - DNA, 18 bp, synthetic construct
  misc_feature 1..18: note = Description of Artificial Sequence: Synthetic Antisense oligonucleotide
  modified_base 6: mod_base = OTHER; note = bicyclic nucleic acid (BNA)
  modified_base 13: mod_base = OTHER; note = bicyclic nucleic acid (BNA)
  modified_base 18: mod_base = OTHER; note = bicyclic nucleic acid (BNA)
  source 1..18: mol_type = other DNA
ctgtccaagcccggttga

SEQ ID NO: 12699 - DNA, 18 bp, synthetic construct
  misc_feature 1..18: note = Description of Artificial Sequence: Synthetic Antisense oligonucleotide
  modified_base 9: mod_base = OTHER; note = bicyclic nucleic acid (BNA)
  modified_base 11: mod_base = OTHER; note = bicyclic nucleic acid (BNA)
  modified_base 18: mod_base = OTHER; note = bicyclic nucleic acid (BNA)
  source 1..18: mol_type = other DNA
ctgtccaagcccggttga

SEQ ID NO: 12700 - DNA, 18 bp, synthetic construct
  misc_feature 1..18: note = Description of Artificial Sequence: Synthetic Antisense oligonucleotide
  modified_base 11: mod_base = OTHER; note = bicyclic nucleic acid (BNA)
  modified_base 13: mod_base = OTHER; note = bicyclic nucleic acid (BNA)
  modified_base 18: mod_base = OTHER; note = bicyclic nucleic acid (BNA)
  source 1..18: mol_type = other DNA
ctgtccaagcccggttga

SEQ ID NO: 12701 - DNA, 18 bp, synthetic construct
  misc_feature 1..18: note = Description of Artificial Sequence: Synthetic Antisense oligonucleotide
  modified_base 5: mod_base = OTHER; note = bicyclic nucleic acid (BNA)
  modified_base 14: mod_base = OTHER; note = bicyclic nucleic acid (BNA)
  modified_base 18: mod_base = OTHER; note = bicyclic nucleic acid (BNA)
  source 1..18: mol_type = other DNA
ctgtccaagcccggttga

SEQ ID NO: 12702 - DNA, 18 bp, synthetic construct
  misc_feature 1..18: note = Description of Artificial Sequence: Synthetic Antisense oligonucleotide
  modified_base 3: mod_base = OTHER; note = bicyclic nucleic acid (BNA)
  modified_base 14: mod_base = OTHER; note = bicyclic nucleic acid (BNA)
  modified_base 18: mod_base = OTHER; note = bicyclic nucleic acid (BNA)
  source 1..18: mol_type = other DNA
ctgtccaagcccggttga

SEQ ID NO: 12703 - DNA, 18 bp, synthetic construct
  misc_feature 1..18: note = Description of Artificial Sequence: Synthetic Antisense oligonucleotide
  modified_base 10: mod_base = OTHER; note = bicyclic nucleic acid (BNA)
  modified_base 12: mod_base = OTHER; note = bicyclic nucleic acid (BNA)
  modified_base 18: mod_base = OTHER; note = bicyclic nucleic acid (BNA)
  source 1..18: mol_type = other DNA
ctgtccaagcccggttga

SEQ ID NO: 12704 - DNA, 18 bp, synthetic construct
  misc_feature 1..18: note = Description of Artificial Sequence: Synthetic Antisense oligonucleotide
  modified_base 12: mod_base = OTHER; note = bicyclic nucleic acid (BNA)
  modified_base 14: mod_base = OTHER; note = bicyclic nucleic acid (BNA)
  modified_base 18: mod_base = OTHER; note = bicyclic nucleic acid (BNA)
  source 1..18: mol_type = other DNA
ctgtccaagcccggttga

SEQ ID NO: 12705 - DNA, 18 bp, synthetic construct
  misc_feature 1..18: note = Description of Artificial Sequence: Synthetic Antisense oligonucleotide
  modified_base 5: mod_base = OTHER; note = bicyclic nucleic acid (BNA)
  modified_base 11: mod_base = OTHER; note = bicyclic nucleic acid (BNA)
  modified_base 18: mod_base = OTHER; note = bicyclic nucleic acid (BNA)
  source 1..18: mol_type = other DNA
ctgtccaagcccggttga

SEQ ID NO: 12706 - DNA, 18 bp, synthetic construct
  misc_feature 1..18: note = Description of Artificial Sequence: Synthetic Antisense oligonucleotide
  modified_base 6: mod_base = OTHER; note = bicyclic nucleic acid (BNA)
  modified_base 12: mod_base = OTHER; note = bicyclic nucleic acid (BNA)
  modified_base 18: mod_base = OTHER; note = bicyclic nucleic acid (BNA)
  source 1..18: mol_type = other DNA
ctgtccaagcccggttga

SEQ ID NO: 12707 - DNA, 18 bp, synthetic construct
  misc_feature 1..18: note = Description of Artificial Sequence: Synthetic Antisense oligonucleotide
  modified_base 5..6: mod_base = OTHER; note = bicyclic nucleic acid (BNA)
  modified_base 18: mod_base = OTHER; note = bicyclic nucleic acid (BNA)
  source 1..18: mol_type = other DNA
ctgtccaagcccggttga

SEQ ID NO: 12708 - DNA, 18 bp, synthetic construct
  misc_feature 1..18: note = Description of Artificial Sequence: Synthetic Antisense oligonucleotide
  modified_base 11: mod_base = OTHER; note = bicyclic nucleic acid (BNA)
  modified_base 14: mod_base = OTHER; note = bicyclic nucleic acid (BNA)
  modified_base 18: mod_base = OTHER; note = bicyclic nucleic acid (BNA)
  source 1..18: mol_type = other DNA
ctgtccaagcccggttga

SEQ ID NO: 12709 - DNA, 18 bp, synthetic construct
  misc_feature 1..18: note = Description of Artificial Sequence: Synthetic Antisense oligonucleotide
  modified_base 9: mod_base = OTHER; note = bicyclic nucleic acid (BNA)
  modified_base 12: mod_base = OTHER; note = bicyclic nucleic acid (BNA)
  modified_base 18: mod_base = OTHER; note = bicyclic nucleic acid (BNA)
  source 1..18: mol_type = other DNA
ctgtccaagcccggttga

SEQ ID NO: 12710 - DNA, 18 bp, synthetic construct
  misc_feature 1..18: note = Description of Artificial Sequence: Synthetic Antisense oligonucleotide
  modified_base 3: mod_base = OTHER; note = bicyclic nucleic acid (BNA)
  modified_base 11: mod_base = OTHER; note = bicyclic nucleic acid (BNA)
  modified_base 18: mod_base = OTHER; note = bicyclic nucleic acid (BNA)
  source 1..18: mol_type = other DNA
ctgtccaagcccggttga

SEQ ID NO: 12711 - DNA, 18 bp, synthetic construct
  misc_feature 1..18: note = Description of Artificial Sequence: Synthetic Antisense oligonucleotide
  modified_base 10..11: mod_base = OTHER; note = bicyclic nucleic acid (BNA)
  modified_base 18: mod_base = OTHER; note = bicyclic nucleic acid (BNA)
  source 1..18: mol_type = other DNA
ctgtccaagcccggttga

SEQ ID NO: 12712 - DNA, 18 bp, synthetic construct
  misc_feature 1..18: note = Description of Artificial Sequence: Synthetic Antisense oligonucleotide
  modified_base 12..13: mod_base = OTHER; note = bicyclic nucleic acid (BNA)
  modified_base 18: mod_base = OTHER; note = bicyclic nucleic acid (BNA)
  source 1..18: mol_type = other DNA
ctgtccaagcccggttga

SEQ ID NO: 12713 - DNA, 18 bp, synthetic construct
  misc_feature 1..18: note = Description of Artificial Sequence: Synthetic Antisense oligonucleotide
  modified_base 5: mod_base = OTHER; note = bicyclic nucleic acid (BNA)
  modified_base 12: mod_base = OTHER; note = bicyclic nucleic acid (BNA)
  modified_base 18: mod_base = OTHER; note = bicyclic nucleic acid (BNA)
  source 1..18: mol_type = other DNA
ctgtccaagcccggttga

SEQ ID NO: 12714 - DNA, 18 bp, synthetic construct
  misc_feature 1..18: note = Description of Artificial Sequence: Synthetic Antisense oligonucleotide
  modified_base 10: mod_base = OTHER; note = bicyclic nucleic acid (BNA)
  modified_base 14: mod_base = OTHER; note = bicyclic nucleic acid (BNA)
  modified_base 18: mod_base = OTHER; note = bicyclic nucleic acid (BNA)
  source 1..18: mol_type = other DNA
ctgtccaagcccggttga

SEQ ID NO: 12715 - DNA, 18 bp, synthetic construct
  misc_feature 1..18: note = Description of Artificial Sequence: Synthetic Antisense oligonucleotide
  modified_base 6: mod_base = OTHER; note = bicyclic nucleic acid (BNA)
  modified_base 11: mod_base = OTHER; note = bicyclic nucleic acid (BNA)
  modified_base 18: mod_base = OTHER; note = bicyclic nucleic acid (BNA)
  source 1..18: mol_type = other DNA
ctgtccaagcccggttga

SEQ ID NO: 12716 - DNA, 18 bp, synthetic construct
  misc_feature 1..18: note = Description of Artificial Sequence: Synthetic Antisense oligonucleotide
  modified_base 9: mod_base = OTHER; note = bicyclic nucleic acid (BNA)
  modified_base 13: mod_base = OTHER; note = bicyclic nucleic acid (BNA)
  modified_base 18: mod_base = OTHER; note = bicyclic nucleic acid (BNA)
  source 1..18: mol_type = other DNA
ctgtccaagcccggttga

SEQ ID NO: 12717 - DNA, 18 bp, synthetic construct
  misc_feature 1..18: note = Description of Artificial Sequence: Synthetic Antisense oligonucleotide
  modified_base 3: mod_base = OTHER; note = bicyclic nucleic acid (BNA)
  modified_base 12: mod_base = OTHER; note = bicyclic nucleic acid (BNA)
  modified_base 18: mod_base = OTHER; note = bicyclic nucleic acid (BNA)
  source 1..18: mol_type = other DNA
ctgtccaagcccggttga

SEQ ID NO: 12718 - DNA, 18 bp, synthetic construct
  misc_feature 1..18: note = Description of Artificial Sequence: Synthetic Antisense oligonucleotide
  modified_base 3: mod_base = OTHER; note = bicyclic nucleic acid (BNA)
  modified_base 5: mod_base = OTHER; note = bicyclic nucleic acid (BNA)
  modified_base 18: mod_base = OTHER; note = bicyclic nucleic acid (BNA)
  source 1..18: mol_type = other DNA
ctgtccaagcccggttga

SEQ ID NO: 12719 - DNA, 18 bp, synthetic construct
  misc_feature 1..18: note = Description of Artificial Sequence: Synthetic Antisense oligonucleotide
  modified_base 10: mod_base = OTHER; note = bicyclic nucleic acid (BNA)
  modified_base 13: mod_base = OTHER; note = bicyclic nucleic acid (BNA)
  modified_base 18: mod_base = OTHER; note = bicyclic nucleic acid (BNA)
  source 1..18: mol_type = other DNA
ctgtccaagcccggttga

SEQ ID NO: 12720 - DNA, 20 bp, synthetic construct
  misc_feature 1..20: note = Description of Artificial Sequence: Synthetic Antisense oligonucleotide
  modified_base 2: mod_base = OTHER; note = bicyclic nucleic acid (BNA)
  modified_base 20: mod_base = OTHER; note = bicyclic nucleic acid (BNA)
  source 1..20: mol_type = other DNA
tcaaggaagatggcatttct

SEQ ID NO: 12721 - DNA, 20 bp, synthetic construct
  misc_feature 1..20: note = Description of Artificial Sequence: Synthetic Antisense oligonucleotide
  modified_base 9: mod_base = OTHER; note = bicyclic nucleic acid (BNA)
  modified_base 20: mod_base = OTHER; note = bicyclic nucleic acid (BNA)
  source 1..20: mol_type = other DNA
tcaaggaagatggcatttct

SEQ ID NO: 12722 - DNA, 20 bp, synthetic construct
  misc_feature 1..20: note = Description of Artificial Sequence: Synthetic Antisense oligonucleotide
  modified_base 5: mod_base = OTHER; note = bicyclic nucleic acid (BNA)
  modified_base 20: mod_base = OTHER; note = bicyclic nucleic acid (BNA)
  source 1..20: mol_type = other DNA
tcaaggaagatggcatttct

SEQ ID NO: 12723 - DNA, 20 bp, synthetic construct
  misc_feature 1..20: note = Description of Artificial Sequence: Synthetic Antisense oligonucleotide
  modified_base 6: mod_base = OTHER; note = bicyclic nucleic acid (BNA)
  modified_base 20: mod_base = OTHER; note = bicyclic nucleic acid (BNA)
  source 1..20: mol_type = other DNA
tcaaggaagatggcatttct

SEQ ID NO: 12724 - DNA, 20 bp, synthetic construct
  misc_feature 1..20: note = Description of Artificial Sequence: Synthetic Antisense oligonucleotide
  modified_base 12: mod_base = OTHER; note = bicyclic nucleic acid (BNA)
  modified_base 20: mod_base = OTHER; note = bicyclic nucleic acid (BNA)
  source 1..20: mol_type = other DNA
tcaaggaagatggcatttct

SEQ ID NO: 12725 - DNA, 20 bp, synthetic construct
  misc_feature 1..20: note = Description of Artificial Sequence: Synthetic Antisense oligonucleotide
  modified_base 13: mod_base = OTHER; note = bicyclic nucleic acid (BNA)
  modified_base 20: mod_base = OTHER; note = bicyclic nucleic acid (BNA)
  source 1..20: mol_type = other DNA
tcaaggaagatggcatttct

SEQ ID NO: 12726 - DNA, 20 bp, synthetic construct
  misc_feature 1..20: note = Description of Artificial Sequence: Synthetic Antisense oligonucleotide
  modified_base 14: mod_base = OTHER; note = bicyclic nucleic acid (BNA)
  modified_base 20: mod_base = OTHER; note = bicyclic nucleic acid (BNA)
  source 1..20: mol_type = other DNA
tcaaggaagatggcatttct

SEQ ID NO: 12727 - DNA, 22 bp, synthetic construct
  misc_feature 1..22: note = Description of Artificial Sequence: Synthetic Antisense oligonucleotide
  modified_base 2: mod_base = OTHER; note = bicyclic nucleic acid (BNA)
  modified_base 22: mod_base = OTHER; note = bicyclic nucleic acid (BNA)
  source 1..22: mol_type = other DNA
tcaaggaagatggcatttctag

SEQ ID NO: 12728 - DNA, 22 bp, synthetic construct
  misc_feature 1..22: note = Description of Artificial Sequence: Synthetic Antisense oligonucleotide
  modified_base 9: mod_base = OTHER; note = bicyclic nucleic acid (BNA)
  modified_base 22: mod_base = OTHER; note = bicyclic nucleic acid (BNA)
  source 1..22: mol_type = other DNA
tcaaggaagatggcatttctag

SEQ ID NO: 12729 - DNA, 22 bp, synthetic construct
  misc_feature 1..22: note = Description of Artificial Sequence: Synthetic Antisense oligonucleotide
  modified_base 5: mod_base = OTHER; note = bicyclic nucleic acid (BNA)
  modified_base 22: mod_base = OTHER; note = bicyclic nucleic acid (BNA)
  source 1..22: mol_type = other DNA
tcaaggaagatggcatttctag

SEQ ID NO: 12730 - DNA, 22 bp, synthetic construct
  misc_feature 1..22: note = Description of Artificial Sequence: Synthetic Antisense oligonucleotide
  modified_base 6: mod_base = OTHER; note = bicyclic nucleic acid (BNA)
  modified_base 22: mod_base = OTHER; note = bicyclic nucleic acid (BNA)
  source 1..22: mol_type = other DNA
tcaaggaagatggcatttctag

SEQ ID NO: 12731 - DNA, 22 bp, synthetic construct
  misc_feature 1..22: note = Description of Artificial Sequence: Synthetic Antisense oligonucleotide
  modified_base 12: mod_base = OTHER; note = bicyclic nucleic acid (BNA)
  modified_base 22: mod_base = OTHER; note = bicyclic nucleic acid (BNA)
  source 1..22: mol_type = other DNA
tcaaggaagatggcatttctag

SEQ ID NO: 12732 - DNA, 22 bp, synthetic construct
  misc_feature 1..22: note = Description of Artificial Sequence: Synthetic Antisense oligonucleotide
  modified_base 13: mod_base = OTHER; note = bicyclic nucleic acid (BNA)
  modified_base 22: mod_base = OTHER; note = bicyclic nucleic acid (BNA)
  source 1..22: mol_type = other DNA
tcaaggaagatggcatttctag

SEQ ID NO: 12733 - DNA, 22 bp, synthetic construct
  misc_feature 1..22: note = Description of Artificial Sequence: Synthetic Antisense oligonucleotide
  modified_base 19: mod_base = OTHER; note = bicyclic nucleic acid (BNA)
  modified_base 22: mod_base = OTHER; note = bicyclic nucleic acid (BNA)
  source 1..22: mol_type = other DNA
tcaaggaagatggcatttctag

SEQ ID NO: 12734 - DNA, 22 bp, synthetic construct
  misc_feature 1..22: note = Description of Artificial Sequence: Synthetic Antisense oligonucleotide
  modified_base 14: mod_base = OTHER; note = bicyclic nucleic acid (BNA)
  modified_base 22: mod_base = OTHER; note = bicyclic nucleic acid (BNA)
  source 1..22: mol_type = other DNA
tcaaggaagatggcatttctag

SEQ ID NO: 12735 - DNA, 20 bp, synthetic construct
  misc_feature 1..20: note = Description of Artificial Sequence: Synthetic Antisense oligonucleotide
  modified_base 9: mod_base = OTHER; note = bicyclic nucleic acid (BNA)
  modified_base 14: mod_base = OTHER; note = bicyclic nucleic acid (BNA)
  modified_base 20: mod_base = OTHER; note = bicyclic nucleic acid (BNA)
  source 1..20: mol_type = other DNA
tcaaggaagatggcatttct

SEQ ID NO: 12736 - DNA, 20 bp, synthetic construct
  misc_feature 1..20: note = Description of Artificial Sequence: Synthetic Antisense oligonucleotide
  modified_base 5: mod_base = OTHER; note = bicyclic nucleic acid (BNA)
  modified_base 9: mod_base = OTHER; note = bicyclic nucleic acid (BNA)
  modified_base 20: mod_base = OTHER; note = bicyclic nucleic acid (BNA)
  source 1..20: mol_type = other DNA
tcaaggaagatggcatttct

SEQ ID NO: 12737 - DNA, 20 bp, synthetic construct
  misc_feature 1..20: note = Description of Artificial Sequence: Synthetic Antisense oligonucleotide
  modified_base 6: mod_base = OTHER; note = bicyclic nucleic acid (BNA)
  modified_base 14: mod_base = OTHER; note = bicyclic nucleic acid (BNA)
  modified_base 20: mod_base = OTHER; note = bicyclic nucleic acid (BNA)
  source 1..20: mol_type = other DNA
tcaaggaagatggcatttct

SEQ ID NO: 12738 - DNA, 20 bp, synthetic construct
  misc_feature 1..20: note = Description of Artificial Sequence: Synthetic Antisense oligonucleotide
  modified_base 5: mod_base = OTHER; note = bicyclic nucleic acid (BNA)
  modified_base 13: mod_base = OTHER; note = bicyclic nucleic acid (BNA)
  modified_base 20: mod_base = OTHER; note = bicyclic nucleic acid (BNA)
  source 1..20: mol_type = other DNA
tcaaggaagatggcatttct

SEQ ID NO: 12739 - DNA, 20 bp, synthetic construct
  misc_feature 1..20: note = Description of Artificial Sequence: Synthetic Antisense oligonucleotide
  modified_base 2: mod_base = OTHER; note = bicyclic nucleic acid (BNA)
  modified_base 12: mod_base = OTHER; note = bicyclic nucleic acid (BNA)
  modified_base 20: mod_base = OTHER; note = bicyclic nucleic acid (BNA)
  source 1..20: mol_type = other DNA
tcaaggaagatggcatttct

SEQ ID NO: 12740 - DNA, 20 bp, synthetic construct
  misc_feature 1..20: note = Description of Artificial Sequence: Synthetic Antisense oligonucleotide
  modified_base 6: mod_base = OTHER; note = bicyclic nucleic acid (BNA)
  modified_base 9: mod_base = OTHER; note = bicyclic nucleic acid (BNA)
  modified_base 20: mod_base = OTHER; note = bicyclic nucleic acid (BNA)
  source 1..20: mol_type = other DNA
tcaaggaagatggcatttct

SEQ ID NO: 12741 - DNA, 20 bp, synthetic construct
  misc_feature 1..20: note = Description of Artificial Sequence: Synthetic Antisense oligonucleotide
  modified_base 13..14: mod_base = OTHER; note = bicyclic nucleic acid (BNA)
  modified_base 20: mod_base = OTHER; note = bicyclic nucleic acid (BNA)
  source 1..20: mol_type = other DNA
tcaaggaagatggcatttct

SEQ ID NO: 12742 - DNA, 20 bp, synthetic construct
  misc_feature 1..20: note = Description of Artificial Sequence: Synthetic Antisense oligonucleotide
  modified_base 6: mod_base = OTHER; note = bicyclic nucleic acid (BNA)
  modified_base 13: mod_base = OTHER; note = bicyclic nucleic acid (BNA)
  modified_base 20: mod_base = OTHER; note = bicyclic nucleic acid (BNA)
  source 1..20: mol_type = other DNA
tcaaggaagatggcatttct

SEQ ID NO: 12743 - DNA, 20 bp, synthetic construct
  misc_feature 1..20: note = Description of Artificial Sequence: Synthetic Antisense oligonucleotide
  modified_base 5: mod_base = OTHER; note = bicyclic nucleic acid (BNA)
  modified_base 14: mod_base = OTHER; note = bicyclic nucleic acid (BNA)
  modified_base 20: mod_base = OTHER; note = bicyclic nucleic acid (BNA)
  source 1..20: mol_type = other DNA
tcaaggaagatggcatttct

SEQ ID NO: 12744 - DNA, 20 bp, synthetic construct
  misc_feature 1..20: note = Description of Artificial Sequence: Synthetic Antisense oligonucleotide
  modified_base 2: mod_base = OTHER; note = bicyclic nucleic acid (BNA)
  modified_base 6: mod_base = OTHER; note = bicyclic nucleic acid (BNA)
  modified_base 20: mod_base = OTHER; note = bicyclic nucleic acid (BNA)
  source 1..20: mol_type = other DNA
tcaaggaagatggcatttct

SEQ ID NO: 12745 - DNA, 20 bp, synthetic construct
  misc_feature 1..20: note = Description of Artificial Sequence: Synthetic Antisense oligonucleotide
  modified_base 12: mod_base = OTHER; note = bicyclic nucleic acid (BNA)
  modified_base 14: mod_base = OTHER; note = bicyclic nucleic acid (BNA)
  modified_base 20: mod_base = OTHER; note = bicyclic nucleic acid (BNA)
  source 1..20: mol_type = other DNA
tcaaggaagatggcatttct

SEQ ID NO: 12746 - DNA, 20 bp, synthetic construct
  misc_feature 1..20: note = Description of Artificial Sequence: Synthetic Antisense oligonucleotide
  modified_base 6: mod_base = OTHER; note = bicyclic nucleic acid (BNA)
  modified_base 12: mod_base = OTHER; note = bicyclic nucleic acid (BNA)
  modified_base 20: mod_base = OTHER; note = bicyclic nucleic acid (BNA)
  source 1..20: mol_type = other DNA
tcaaggaagatggcatttct

SEQ ID NO: 12747 - DNA, 20 bp, synthetic construct
  misc_feature 1..20: note = Description of Artificial Sequence: Synthetic Antisense oligonucleotide
  modified_base 5..6: mod_base = OTHER; note = bicyclic nucleic acid (BNA)
  modified_base 20: mod_base = OTHER; note = bicyclic nucleic acid (BNA)
  source 1..20: mol_type = other DNA
tcaaggaagatggcatttct

SEQ ID NO: 12748 - DNA, 20 bp, synthetic construct
  misc_feature 1..20: note = Description of Artificial Sequence: Synthetic Antisense oligonucleotide
  modified_base 2: mod_base = OTHER; note = bicyclic nucleic acid (BNA)
  modified_base 14: mod_base = OTHER; note = bicyclic nucleic acid (BNA)
  modified_base 20: mod_base = OTHER; note = bicyclic nucleic acid (BNA)
  source 1..20: mol_type = other DNA
tcaaggaagatggcatttct

SEQ ID NO: 12749 - DNA, 20 bp, synthetic construct
  misc_feature 1..20: note = Description of Artificial Sequence: Synthetic Antisense oligonucleotide
  modified_base 9: mod_base = OTHER; note = bicyclic nucleic acid (BNA)
  modified_base 12: mod_base = OTHER; note = bicyclic nucleic acid (BNA)
  modified_base 20: mod_base = OTHER; note = bicyclic nucleic acid (BNA)
  source 1..20: mol_type = other DNA
tcaaggaagatggcatttct

SEQ ID NO: 12750 - DNA, 20 bp, synthetic construct
  misc_feature 1..20: note = Description of Artificial Sequence: Synthetic Antisense oligonucleotide
  modified_base 2: mod_base = OTHER; note = bicyclic nucleic acid (BNA)
  modified_base 5: mod_base = OTHER; note = bicyclic nucleic acid (BNA)
  modified_base 20: mod_base = OTHER; note = bicyclic nucleic acid (BNA)
  source 1..20: mol_type = other DNA
tcaaggaagatggcatttct

SEQ ID NO: 12751 - DNA, 20 bp, synthetic construct
  misc_feature 1..20: note = Description of Artificial Sequence: Synthetic Antisense oligonucleotide
  modified_base 12..13: mod_base = OTHER; note = bicyclic nucleic acid (BNA)
  modified_base 20: mod_base = OTHER; note = bicyclic nucleic acid (BNA)
  source 1..20: mol_type = other DNA
tcaaggaagatggcatttct

SEQ ID NO: 12752 - DNA, 20 bp, synthetic construct
  misc_feature 1..20: note = Description of Artificial Sequence: Synthetic Antisense oligonucleotide
  modified_base 5: mod_base = OTHER; note = bicyclic nucleic acid (BNA)
  modified_base 12: mod_base = OTHER; note = bicyclic nucleic acid (BNA)
  modified_base 20: mod_base = OTHER; note = bicyclic nucleic acid (BNA)
  source 1..20: mol_type = other DNA
tcaaggaagatggcatttct

SEQ ID NO: 12753 - DNA, 20 bp, synthetic construct
  misc_feature 1..20: note = Description of Artificial Sequence: Synthetic Antisense oligonucleotide
  modified_base 2: mod_base = OTHER; note = bicyclic nucleic acid (BNA)
  modified_base 13: mod_base = OTHER; note = bicyclic nucleic acid (BNA)
  modified_base 20: mod_base = OTHER; note = bicyclic nucleic acid (BNA)
  source 1..20: mol_type = other DNA
tcaaggaagatggcatttct

SEQ ID NO: 12754 - DNA, 20 bp, synthetic construct
  misc_feature 1..20: note = Description of Artificial Sequence: Synthetic Antisense oligonucleotide
  modified_base 9: mod_base = OTHER; note = bicyclic nucleic acid (BNA)
  modified_base 13: mod_base = OTHER; note = bicyclic nucleic acid (BNA)
  modified_base 20: mod_base = OTHER; note = bicyclic nucleic acid (BNA)
  source 1..20: mol_type = other DNA
tcaaggaagatggcatttct

SEQ ID NO: 12755 - DNA, 20 bp, synthetic construct
  misc_feature 1..20: note = Description of Artificial Sequence: Synthetic Antisense oligonucleotide
  modified_base 2: mod_base = OTHER; note = bicyclic nucleic acid (BNA)
  modified_base 9: mod_base = OTHER; note = bicyclic nucleic acid (BNA)
  modified_base 20: mod_base = OTHER; note = bicyclic nucleic acid (BNA)
  source 1..20: mol_type = other DNA
tcaaggaagatggcatttct

SEQ ID NO: 12756 - DNA, 22 bp, synthetic construct
  misc_feature 1..22: note = Description of Artificial Sequence: Synthetic Antisense oligonucleotide
  modified_base 9: mod_base = OTHER; note = bicyclic nucleic acid (BNA)
  modified_base 14: mod_base = OTHER; note = bicyclic nucleic acid (BNA)
  modified_base 22: mod_base = OTHER; note = bicyclic nucleic acid (BNA)
  source 1..22: mol_type = other DNA
tcaaggaagatggcatttctag

SEQ ID NO: 12757 - DNA, 22 bp, synthetic construct
  misc_feature 1..22: note = Description of Artificial Sequence: Synthetic Antisense oligonucleotide
  modified_base 5: mod_base = OTHER; note = bicyclic nucleic acid (BNA)
  modified_base 9: mod_base = OTHER; note = bicyclic nucleic acid (BNA)
  modified_base 22: mod_base = OTHER; note = bicyclic nucleic acid (BNA)
  source 1..22: mol_type = other DNA
tcaaggaagatggcatttctag

SEQ ID NO: 12758 - DNA, 22 bp, synthetic construct
  misc_feature 1..22: note = Description of Artificial Sequence: Synthetic Antisense oligonucleotide
  modified_base 5: mod_base = OTHER; note = bicyclic nucleic acid (BNA)
  modified_base 19: mod_base = OTHER; note = bicyclic nucleic acid (BNA)
  modified_base 22: mod_base = OTHER; note = bicyclic nucleic acid (BNA)
  source 1..22: mol_type = other DNA
tcaaggaagatggcatttctag

SEQ ID NO: 12759 - DNA, 22 bp, synthetic construct
  misc_feature 1..22: note = Description of Artificial Sequence: Synthetic Antisense oligonucleotide
  modified_base 6: mod_base = OTHER; note = bicyclic nucleic acid (BNA)
  modified_base 14: mod_base = OTHER; note = bicyclic nucleic acid (BNA)
  modified_base 22: mod_base = OTHER; note = bicyclic nucleic acid (BNA)
  source 1..22: mol_type = other DNA
tcaaggaagatggcatttctag

SEQ ID NO: 12760 - DNA, 22 bp, synthetic construct
  misc_feature 1..22: note = Description of Artificial Sequence: Synthetic Antisense oligonucleotide
  modified_base 5: mod_base = OTHER; note = bicyclic nucleic acid (BNA)
  modified_base 13: mod_base = OTHER; note = bicyclic nucleic acid (BNA)
  modified_base 22: mod_base = OTHER; note = bicyclic nucleic acid (BNA)
  source 1..22: mol_type = other DNA
tcaaggaagatggcatttctag

SEQ ID NO: 12761 - DNA, 22 bp, synthetic construct
  misc_feature 1..22: note = Description of Artificial Sequence: Synthetic Antisense oligonucleotide
  modified_base 2: mod_base = OTHER; note = bicyclic nucleic acid (BNA)
  modified_base 12: mod_base = OTHER; note = bicyclic nucleic acid (BNA)
  modified_base 22: mod_base = OTHER; note = bicyclic nucleic acid (BNA)
  source 1..22: mol_type = other DNA
tcaaggaagatggcatttctag

SEQ ID NO: 12762 - DNA, 22 bp, synthetic construct
  misc_feature 1..22: note = Description of Artificial Sequence: Synthetic Antisense oligonucleotide
  modified_base 6: mod_base = OTHER; note = bicyclic nucleic acid (BNA)
  modified_base 9: mod_base = OTHER; note = bicyclic nucleic acid (BNA)
  modified_base 22: mod_base = OTHER; note = bicyclic nucleic acid (BNA)
  source 1..22: mol_type = other DNA
tcaaggaagatggcatttctag

SEQ ID NO: 12763 - DNA, 22 bp, synthetic construct
  misc_feature 1..22: note = Description of Artificial Sequence: Synthetic Antisense oligonucleotide
  modified_base 13..14: mod_base = OTHER; note = bicyclic nucleic acid (BNA)
  modified_base 22: mod_base = OTHER; note = bicyclic nucleic acid (BNA)
  source 1..22: mol_type = other DNA
tcaaggaagatggcatttctag

SEQ ID NO: 12764 - DNA, 22 bp, synthetic construct
  misc_feature 1..22: note = Description of Artificial Sequence: Synthetic Antisense oligonucleotide
  modified_base 6: mod_base = OTHER; note = bicyclic nucleic acid (BNA)
  modified_base 13: mod_base = OTHER; note = bicyclic nucleic acid (BNA)
  modified_base 22: mod_base = OTHER; note = bicyclic nucleic acid (BNA)
  source 1..22: mol_type = other DNA
tcaaggaagatggcatttctag

SEQ ID NO: 12765 - DNA, 22 bp, synthetic construct
  misc_feature 1..22: note = Description of Artificial Sequence: Synthetic Antisense oligonucleotide
  modified_base 6: mod_base = OTHER; note = bicyclic nucleic acid (BNA)
  modified_base 19: mod_base = OTHER; note = bicyclic nucleic acid (BNA)
  modified_base 22: mod_base = OTHER; note = bicyclic nucleic acid (BNA)
  source 1..22: mol_type = other DNA
tcaaggaagatggcatttctag

SEQ ID NO: 12766 - DNA, 22 bp, synthetic construct
  misc_feature 1..22: note = Description of Artificial Sequence: Synthetic Antisense oligonucleotide
  modified_base 5: mod_base = OTHER; note = bicyclic nucleic acid (BNA)
  modified_base 14: mod_base = OTHER; note = bicyclic nucleic acid (BNA)
  modified_base 22: mod_base = OTHER; note = bicyclic nucleic acid (BNA)
  source 1..22: mol_type = other DNA
tcaaggaagatggcatttctag

SEQ ID NO: 12767 - DNA, 22 bp, synthetic construct
  misc_feature 1..22: note = Description of Artificial Sequence: Synthetic Antisense oligonucleotide
  modified_base 2: mod_base = OTHER; note = bicyclic nucleic acid (BNA)
  modified_base 6: mod_base = OTHER; note = bicyclic nucleic acid (BNA)
  modified_base 22: mod_base = OTHER; note = bicyclic nucleic acid (BNA)
  source 1..22: mol_type = other DNA
tcaaggaagatggcatttctag

SEQ ID NO: 12768 - DNA, 22 bp, synthetic construct
  misc_feature 1..22: note = Description of Artificial Sequence: Synthetic Antisense oligonucleotide
  modified_base 12: mod_base = OTHER; note = bicyclic nucleic acid (BNA)
  modified_base 19: mod_base = OTHER; note = bicyclic nucleic acid (BNA)
  modified_base 22: mod_base = OTHER; note = bicyclic nucleic acid (BNA)
  source 1..22: mol_type = other DNA
tcaaggaagatggcatttctag

SEQ ID NO: 12769 - DNA, 22 bp, synthetic construct
  misc_feature 1..22: note = Description of Artificial Sequence: Synthetic Antisense oligonucleotide
  modified_base 12: mod_base = OTHER; note = bicyclic nucleic acid (BNA)
  modified_base 14: mod_base = OTHER; note = bicyclic nucleic acid (BNA)
  modified_base 22: mod_base = OTHER; note = bicyclic nucleic acid (BNA)
  source 1..22: mol_type = other DNA
tcaaggaagatggcatttctag

SEQ ID NO: 12770 - DNA, 22 bp, synthetic construct
  misc_feature 1..22: note = Description of Artificial Sequence: Synthetic Antisense oligonucleotide
  modified_base 6: mod_base = OTHER; note = bicyclic nucleic acid (BNA)
  modified_base 12: mod_base = OTHER; note = bicyclic nucleic acid (BNA)
  modified_base 22: mod_base = OTHER; note = bicyclic nucleic acid (BNA)
  source 1..22: mol_type = other DNA
tcaaggaagatggcatttctag

SEQ ID NO: 12771 - DNA, 22 bp, synthetic construct
  misc_feature 1..22: note = Description of Artificial Sequence: Synthetic Antisense oligonucleotide
  modified_base 5..6: mod_base = OTHER; note = bicyclic nucleic acid (BNA)
  modified_base 22: mod_base = OTHER; note = bicyclic nucleic acid (BNA)
  source 1..22: mol_type = other DNA
tcaaggaagatggcatttctag

SEQ ID NO: 12772 - DNA, 22 bp, synthetic construct
  misc_feature 1..22: note = Description of Artificial Sequence: Synthetic Antisense oligonucleotide
  modified_base 2: mod_base = OTHER; note = bicyclic nucleic acid (BNA)
  modified_base 14: mod_base = OTHER; note = bicyclic nucleic acid (BNA)
  modified_base 22: mod_base = OTHER; note = bicyclic nucleic acid (BNA)
  source 1..22: mol_type = other DNA
tcaaggaagatggcatttctag

SEQ ID NO: 12773 - DNA, 22 bp, synthetic construct
  misc_feature 1..22: note = Description of Artificial Sequence: Synthetic Antisense oligonucleotide
  modified_base 9: mod_base = OTHER; note = bicyclic nucleic acid (BNA)
  modified_base 12: mod_base = OTHER; note = bicyclic nucleic acid (BNA)
  modified_base 22: mod_base = OTHER; note = bicyclic nucleic acid (BNA)
  source 1..22: mol_type = other DNA
tcaaggaagatggcatttctag

SEQ ID NO: 12774 - DNA, 22 bp, synthetic construct
  misc_feature 1..22: note = Description of Artificial Sequence: Synthetic Antisense oligonucleotide
  modified_base 2: mod_base = OTHER; note = bicyclic nucleic acid (BNA)
  modified_base 5: mod_base = OTHER; note = bicyclic nucleic acid (BNA)
  modified_base 22: mod_base = OTHER; note = bicyclic nucleic acid (BNA)
  source 1..22: mol_type = other DNA
tcaaggaagatggcatttctag

SEQ ID NO: 12775 - DNA, 22 bp, synthetic construct
  misc_feature 1..22: note = Description of Artificial Sequence: Synthetic Antisense oligonucleotide
  modified_base 13: mod_base = OTHER; note = bicyclic nucleic acid (BNA)
  modified_base 19: mod_base = OTHER; note = bicyclic nucleic acid (BNA)
  modified_base 22: mod_base = OTHER; note = bicyclic nucleic acid (BNA)
  source 1..22: mol_type = other DNA
tcaaggaagatggcatttctag

SEQ ID NO: 12776 - DNA, 22 bp, synthetic construct
  misc_feature 1..22: note = Description of Artificial Sequence: Synthetic Antisense oligonucleotide
  modified_base 12..13: mod_base = OTHER; note = bicyclic nucleic acid (BNA)
  modified_base 22: mod_base = OTHER; note = bicyclic nucleic acid (BNA)
  source 1..22: mol_type = other DNA
tcaaggaagatggcatttctag

SEQ ID NO: 12777 - DNA, 22 bp, synthetic construct
  misc_feature 1..22: note = Description of Artificial Sequence: Synthetic Antisense oligonucleotide
  modified_base 5: mod_base = OTHER; note = bicyclic nucleic acid (BNA)
  modified_base 12: mod_base = OTHER; note = bicyclic nucleic acid (BNA)
  modified_base 22: mod_base = OTHER; note = bicyclic nucleic acid (BNA)
  source 1..22: mol_type = other DNA
tcaaggaagatggcatttctag

SEQ ID NO: 12778 - DNA, 22 bp, synthetic construct
  misc_feature 1..22: note = Description of Artificial Sequence: Synthetic Antisense oligonucleotide
  modified_base 2: mod_base = OTHER; note = bicyclic nucleic acid (BNA)
  modified_base 13: mod_base = OTHER; note = bicyclic nucleic acid (BNA)
  modified_base 22: mod_base = OTHER; note = bicyclic nucleic acid (BNA)
  source 1..22: mol_type = other DNA
tcaaggaagatggcatttctag

SEQ ID NO: 12779 - DNA, 22 bp, synthetic construct
  misc_feature 1..22: note = Description of Artificial Sequence: Synthetic Antisense oligonucleotide
  modified_base 9: mod_base = OTHER; note = bicyclic nucleic acid (BNA)
  modified_base 13: mod_base = OTHER; note = bicyclic nucleic acid (BNA)
  modified_base 22: mod_base = OTHER; note = bicyclic nucleic acid (BNA)
  source 1..22: mol_type = other DNA
tcaaggaagatggcatttctag

SEQ ID NO: 12780 - DNA, 22 bp, synthetic construct
  misc_feature 1..22: note = Description of Artificial Sequence: Synthetic Antisense oligonucleotide
  modified_base 2: mod_base = OTHER; note = bicyclic nucleic acid (BNA)
  modified_base 19: mod_base = OTHER; note = bicyclic nucleic acid (BNA)
  modified_base 22: mod_base = OTHER; note = bicyclic nucleic acid (BNA)
  source 1..22: mol_type = other DNA
tcaaggaagatggcatttctag

SEQ ID NO: 12781 - DNA, 22 bp, synthetic construct
  misc_feature 1..22: note = Description of Artificial Sequence: Synthetic Antisense oligonucleotide
  modified_base 2: mod_base = OTHER; note = bicyclic nucleic acid (BNA)
  modified_base 9: mod_base = OTHER; note = bicyclic nucleic acid (BNA)
  modified_base 22: mod_base = OTHER; note = bicyclic nucleic acid (BNA)
  source 1..22: mol_type = other DNA
tcaaggaagatggcatttctag

SEQ ID NO: 12782 - DNA, 22 bp, synthetic construct
  misc_feature 1..22: note = Description of Artificial Sequence: Synthetic Antisense oligonucleotide
  modified_base 14: mod_base = OTHER; note = bicyclic nucleic acid (BNA)
  modified_base 19: mod_base = OTHER; note = bicyclic nucleic acid (BNA)
  modified_base 22: mod_base = OTHER; note = bicyclic nucleic acid (BNA)
  source 1..22: mol_type = other DNA
tcaaggaagatggcatttctag

SEQ ID NO: 12783 - DNA, 22 bp, synthetic construct
  misc_feature 1..22: note = Description of Artificial Sequence: Synthetic Antisense oligonucleotide
  modified_base 9: mod_base = OTHER; note = bicyclic nucleic acid (BNA)
  modified_base 19: mod_base = OTHER; note = bicyclic nucleic acid (BNA)
  modified_base 22: mod_base = OTHER; note = bicyclic nucleic acid (BNA)
  source 1..22: mol_type = other DNA
tcaaggaagatggcatttctag

SEQ ID NO: 12784 - DNA, 18 bp, synthetic construct
  misc_feature 1..18: note = Description of Artificial Sequence: Synthetic Antisense oligonucleotide
  modified_base 2: mod_base = OTHER; note = bicyclic nucleic acid (BNA)
  modified_base 18: mod_base = OTHER; note = bicyclic nucleic acid (BNA)
  modified_base 9: mod_base = OTHER; note = 5-methyl
  modified_base 13..14: mod_base = OTHER; note = 5-methyl
  modified_base 18: mod_base = OTHER; note = 5-methyl
  source 1..18: mol_type = other DNA
ggtaagttctgtccaagc

SEQ ID NO: 12785 - DNA, 18 bp, synthetic construct
  misc_feature 1..18: note = Description of Artificial Sequence: Synthetic Antisense oligonucleotide
  modified_base 9: mod_base = OTHER; note = 5-methyl
  modified_base 13..14: mod_base = OTHER; note = 5-methyl
  modified_base 18: mod_base = OTHER; note = 5-methyl
  modified_base 9: mod_base = OTHER; note = bicyclic nucleic acid (BNA)
  modified_base 18: mod_base = OTHER; note = bicyclic nucleic acid (BNA)
  source 1..18: mol_type = other DNA
ggtaagttctgtccaagc

SEQ ID NO: 12786 - DNA, 18 bp, synthetic construct
  misc_feature 1..18: note = Description of Artificial Sequence: Synthetic Antisense oligonucleotide
  modified_base 9: mod_base = OTHER; note = 5-methyl
  modified_base 13..14: mod_base = OTHER; note = 5-methyl
  modified_base 18: mod_base = OTHER; note = 5-methyl
  modified_base 11: mod_base = OTHER; note = bicyclic nucleic acid (BNA)
  modified_base 18: mod_base = OTHER; note = bicyclic nucleic acid (BNA)
  source 1..18: mol_type = other DNA
ggtaagttctgtccaagc

SEQ ID NO: 12787 - DNA, 18 bp, synthetic construct
  misc_feature 1..18: note = Description of Artificial Sequence: Synthetic Antisense oligonucleotide
  modified_base 6: mod_base = OTHER; note = bicyclic nucleic acid (BNA)
  modified_base 18: mod_base = OTHER; note = bicyclic nucleic acid (BNA)
  modified_base 9: mod_base = OTHER; note = 5-methyl
  modified_base 13..14: mod_base = OTHER; note = 5-methyl
  modified_base 18: mod_base = OTHER; note = 5-methyl
  source 1..18: mol_type = other DNA
ggtaagttctgtccaagc

SEQ ID NO: 12788 - DNA, 18 bp, synthetic construct
  misc_feature 1..18: note = Description of Artificial Sequence: Synthetic Antisense oligonucleotide
  modified_base 9: mod_base = OTHER; note = 5-methyl
  modified_base 13..14: mod_base = OTHER; note = 5-methyl
  modified_base 18: mod_base = OTHER; note = 5-methyl
  modified_base 13: mod_base = OTHER; note = bicyclic nucleic acid (BNA)
  modified_base 18: mod_base = OTHER; note = bicyclic nucleic acid (BNA)
  source 1..18: mol_type = other DNA
ggtaagttctgtccaagc

SEQ ID NO: 12789 - DNA, 18 bp, synthetic construct
  misc_feature 1..18: note = Description of Artificial Sequence: Synthetic Antisense oligonucleotide
  modified_base 9: mod_base = OTHER; note = 5-methyl
  modified_base 13..14: mod_base = OTHER; note = 5-methyl
  modified_base 18: mod_base = OTHER; note = 5-methyl
  modified_base 14: mod_base = OTHER; note = bicyclic nucleic acid (BNA)
  modified_base 18: mod_base = OTHER; note = bicyclic nucleic acid (BNA)
  source 1..18: mol_type = other DNA
ggtaagttctgtccaagc

SEQ ID NO: 12790 - DNA, 18 bp, synthetic construct
  misc_feature 1..18: note = Description of Artificial Sequence: Synthetic Antisense oligonucleotide
  modified_base 8: mod_base = OTHER; note = 5-methyl
  modified_base 12..13: mod_base = OTHER; note = 5-methyl
  modified_base 17..18: mod_base = OTHER; note = 5-methyl
  modified_base 16: mod_base = OTHER; note = bicyclic nucleic acid (BNA)
  modified_base 18: mod_base = OTHER; note = bicyclic nucleic acid (BNA)
  source 1..18: mol_type = other DNA
gtaagttctgtccaagcc

SEQ ID NO: 12791 - DNA, 18 bp, synthetic construct
  misc_feature 1..18: note = Description of Artificial Sequence: Synthetic Antisense oligonucleotide
  modified_base 8: mod_base = OTHER; note = 5-methyl
  modified_base 12..13: mod_base = OTHER; note = 5-methyl
  modified_base 17..18: mod_base = OTHER; note = 5-methyl
  modified_base 10: mod_base = OTHER; note = bicyclic nucleic acid (BNA)
  modified_base 18: mod_base = OTHER; note = bicyclic nucleic acid (BNA)
  source 1..18: mol_type = other DNA
gtaagttctgtccaagcc

SEQ ID NO: 12792 - DNA, 18 bp, synthetic construct
  misc_feature 1..18: note = Description of Artificial Sequence: Synthetic Antisense oligonucleotide
  modified_base 5: mod_base = OTHER; note = bicyclic nucleic acid (BNA)
  modified_base 18: mod_base = OTHER; note = bicyclic nucleic acid (BNA)
  modified_base 8: mod_base = OTHER; note = 5-methyl
  modified_base 12..13: mod_base = OTHER; note = 5-methyl
  modified_base 17..18: mod_base = OTHER; note = 5-methyl
  source 1..18: mol_type = other DNA
gtaagttctgtccaagcc

SEQ ID NO: 12793 - DNA, 18 bp, synthetic construct
  misc_feature 1..18: note = Description of Artificial Sequence: Synthetic Antisense oligonucleotide
  modified_base 8: mod_base = OTHER; note = 5-methyl
  modified_base 12..13: mod_base = OTHER; note = 5-methyl
  modified_base 17..18: mod_base = OTHER; note = 5-methyl
  modified_base 12: mod_base = OTHER; note = bicyclic nucleic acid (BNA)
  modified_base 18: mod_base = OTHER; note = bicyclic nucleic acid (BNA)
  source 1..18: mol_type = other DNA
gtaagttctgtccaagcc

SEQ ID NO: 12794 - DNA, 18 bp, synthetic construct
  misc_feature 1..18: note = Description of Artificial Sequence: Synthetic Antisense oligonucleotide
  modified_base 8: mod_base = OTHER; note = 5-methyl
  modified_base 12..13: mod_base = OTHER; note = 5-methyl
  modified_base 17..18: mod_base = OTHER; note = 5-methyl
  modified_base 13: mod_base = OTHER; note = bicyclic nucleic acid (BNA)
  modified_base 18: mod_base = OTHER; note = bicyclic nucleic acid (BNA)
  source 1..18: mol_type = other DNA
gtaagttctgtccaagcc

SEQ ID NO: 12795 - DNA, 18 bp, synthetic construct
  misc_feature 1..18: note = Description of Artificial Sequence: Synthetic Antisense oligonucleotide
  modified_base 8: mod_base = OTHER; note = 5-methyl
  modified_base 12..13: mod_base = OTHER; note = 5-methyl
  modified_base 17..18: mod_base = OTHER; note = 5-methyl
  modified_base 8: mod_base = OTHER; note = bicyclic nucleic acid (BNA)
  modified_base 18: mod_base = OTHER; note = bicyclic nucleic acid (BNA)
  source 1..18: mol_type = other DNA
gtaagttctgtccaagcc

SEQ ID NO: 12796 - DNA, 18 bp, synthetic construct
  misc_feature 1..18: note = Description of Artificial Sequence: Synthetic Antisense oligonucleotide
  modified_base 2: mod_base = OTHER; note = bicyclic nucleic acid (BNA)
  modified_base 18: mod_base = OTHER; note = bicyclic nucleic acid (BNA)
  modified_base 4: mod_base = OTHER; note = 5-methyl
  modified_base 13: mod_base = OTHER; note = 5-methyl
  modified_base 17..18: mod_base = OTHER; note = 5-methyl
  source 1..18: mol_type = other DNA
agtcggtaagttctgtcc

SEQ ID NO: 12797 - DNA, 18 bp, synthetic construct
  misc_feature 1..18: note = Description of Artificial Sequence: Synthetic Antisense oligonucleotide
  modified_base 4: mod_base = OTHER; note = 5-methyl
  modified_base 13: mod_base = OTHER; note = 5-methyl
  modified_base 17..18: mod_base = OTHER; note = 5-methyl
  modified_base 4: mod_base = OTHER; note = bicyclic nucleic acid (BNA)
  modified_base 18: mod_base = OTHER; note = bicyclic nucleic acid (BNA)
  source 1..18: mol_type = other DNA
agtcggtaagttctgtcc

SEQ ID NO: 12798 - DNA, 18 bp, synthetic construct
  misc_feature 1..18: note = Description of Artificial Sequence: Synthetic Antisense oligonucleotide
  modified_base 4: mod_base = OTHER; note = 5-methyl
  modified_base 13: mod_base = OTHER; note = 5-methyl
  modified_base 17..18: mod_base = OTHER; note = 5-methyl
  modified_base 10: mod_base = OTHER; note = bicyclic nucleic acid (BNA)
  modified_base 18: mod_base = OTHER; note = bicyclic nucleic acid (BNA)
  source 1..18: mol_type = other DNA
agtcggtaagttctgtcc

SEQ ID NO: 12799 - DNA, 18 bp, synthetic construct
  misc_feature 1..18: note = Description of Artificial Sequence: Synthetic Antisense oligonucleotide
  modified_base 4: mod_base = OTHER; note = 5-methyl
  modified_base 13: mod_base = OTHER; note = 5-methyl
  modified_base 17..18: mod_base = OTHER; note = 5-methyl
  modified_base 5: mod_base = OTHER; note = bicyclic nucleic acid (BNA)
  modified_base 18: mod_base = OTHER; note = bicyclic nucleic acid (BNA)
  source 1..18: mol_type = other DNA
agtcggtaagttctgtcc

SEQ ID NO: 12800 - DNA, 18 bp, synthetic construct
  misc_feature 1..18: note = Description of Artificial Sequence: Synthetic Antisense oligonucleotide
  modified_base 4: mod_base = OTHER; note = 5-methyl
  modified_base 13: mod_base = OTHER; note = 5-methyl
  modified_base 17..18: mod_base = OTHER; note = 5-methyl
  modified_base 6: mod_base = OTHER; note = bicyclic nucleic acid (BNA)
  modified_base 18: mod_base = OTHER; note = bicyclic nucleic acid (BNA)
  source 1..18: mol_type = other DNA
agtcggtaagttctgtcc

SEQ ID NO: 12801 - DNA, 18 bp, synthetic construct
  misc_feature 1..18: note = Description of Artificial Sequence: Synthetic Antisense oligonucleotide
  modified_base 4: mod_base = OTHER; note = 5-methyl
  modified_base 13: mod_base = OTHER; note = 5-methyl
  modified_base 17..18: mod_base = OTHER; note = 5-methyl
  modified_base 13: mod_base = OTHER; note = bicyclic nucleic acid (BNA)
  modified_base 18: mod_base = OTHER; note = bicyclic nucleic acid (BNA)
  source 1..18: mol_type = other DNA
agtcggtaagttctgtcc

SEQ ID NO: 12802 - DNA, 18 bp, synthetic construct
  misc_feature 1..18: note = Description of Artificial Sequence: Synthetic Antisense oligonucleotide
  modified_base 4: mod_base = OTHER; note = 5-methyl
  modified_base 13: mod_base = OTHER; note = 5-methyl
  modified_base 17..18: mod_base = OTHER; note = 5-methyl
  modified_base 15: mod_base = OTHER; note = bicyclic nucleic acid (BNA)
  modified_base 18: mod_base = OTHER; note = bicyclic nucleic acid (BNA)
  source 1..18: mol_type = other DNA
agtcggtaagttctgtcc

SEQ ID NO: 12803 - DNA, 18 bp, synthetic construct
  misc_feature 1..18: note = Description of Artificial Sequence: Synthetic Antisense oligonucleotide
  modified_base 1: mod_base = OTHER; note = 5-methyl
  modified_base 5..6: mod_base = OTHER; note = 5-methyl
  modified_base 10..12: mod_base = OTHER; note = 5-methyl
  modified_base 3: mod_base = OTHER; note = bicyclic nucleic acid (BNA)
  modified_base 18: mod_base = OTHER; note = bicyclic nucleic acid (BNA)
  source 1..18: mol_type = other DNA
ctgtccaagcccggttga

SEQ ID NO: 12804 - DNA, 18 bp, synthetic construct
  misc_feature 1..18: note = Description of Artificial Sequence: Synthetic Antisense oligonucleotide
  modified_base 1: mod_base = OTHER; note = 5-methyl
  modified_base 5..6: mod_base = OTHER; note = 5-methyl
  modified_base 10..12: mod_base = OTHER; note = 5-methyl
  modified_base 9: mod_base = OTHER; note = bicyclic nucleic acid (BNA)
  modified_base 18: mod_base = OTHER; note = bicyclic nucleic acid (BNA)
  source 1..18: mol_type = other DNA
ctgtccaagcccggttga

SEQ ID NO: 12805 - DNA, 18 bp, synthetic construct
  misc_feature 1..18: note = Description of Artificial Sequence: Synthetic Antisense oligonucleotide
  modified_base 1: mod_base = OTHER; note = 5-methyl
  modified_base 5..6: mod_base = OTHER; note = 5-methyl
  modified_base 10..12: mod_base = OTHER; note = 5-methyl
  modified_base 10: mod_base = OTHER; note = bicyclic nucleic acid (BNA)
  modified_base 18: mod_base = OTHER; note = bicyclic nucleic acid (BNA)
  source 1..18: mol_type = other DNA
ctgtccaagcccggttga

SEQ ID NO: 12806 - DNA, 18 bp, synthetic construct
  misc_feature 1..18: note = Description of Artificial Sequence: Synthetic Antisense oligonucleotide
  modified_base 1: mod_base = OTHER; note = 5-methyl
  modified_base 5..6: mod_base = OTHER; note = 5-methyl
  modified_base 10..12: mod_base = OTHER; note = 5-methyl
  modified_base 5: mod_base = OTHER; note = bicyclic nucleic acid (BNA)
  modified_base 18: mod_base = OTHER; note = bicyclic nucleic acid (BNA)
  source 1..18: mol_type = other DNA
ctgtccaagcccggttga

SEQ ID NO: 12807 - DNA, 18 bp, synthetic construct
  misc_feature 1..18: note = Description of Artificial Sequence: Synthetic Antisense oligonucleotide
  modified_base 1: mod_base = OTHER; note = 5-methyl
  modified_base 5..6: mod_base = OTHER; note = 5-methyl
  modified_base 10..12: mod_base = OTHER; note = 5-methyl
  modified_base 11: mod_base = OTHER; note = bicyclic nucleic acid (BNA)
  modified_base 18: mod_base = OTHER; note = bicyclic nucleic acid (BNA)
  source 1..18: mol_type = other DNA
ctgtccaagcccggttga

SEQ ID NO: 12808 - DNA, 18 bp, synthetic construct
  misc_feature 1..18: note = Description of Artificial Sequence: Synthetic Antisense oligonucleotide
  modified_base 1: mod_base = OTHER; note = 5-methyl
  modified_base 5..6: mod_base = OTHER; note = 5-methyl
  modified_base 10..12: mod_base = OTHER; note = 5-methyl
  modified_base 6: mod_base = OTHER; note = bicyclic nucleic acid (BNA)
  modified_base 18: mod_base = OTHER; note = bicyclic nucleic acid (BNA)
  source 1..18: mol_type = other DNA
ctgtccaagcccggttga

SEQ ID NO: 12809 - DNA, 18 bp, synthetic construct
  misc_feature 1..18: note = Description of Artificial Sequence: Synthetic Antisense oligonucleotide
  modified_base 1: mod_base = OTHER; note = 5-methyl
  modified_base 5..6: mod_base = OTHER; note = 5-methyl
  modified_base 10..12: mod_base = OTHER; note = 5-methyl
  modified_base 12: mod_base = OTHER; note = bicyclic nucleic acid (BNA)
  modified_base 18: mod_base = OTHER; note = bicyclic nucleic acid (BNA)
  source 1..18: mol_type = other DNA
ctgtccaagcccggttga

SEQ ID NO: 12810 - DNA, 18 bp, synthetic construct
  misc_feature 1..18: note = Description of Artificial Sequence: Synthetic Antisense oligonucleotide
  modified_base 1: mod_base = OTHER; note = 5-methyl
  modified_base 5..6: mod_base = OTHER; note = 5-methyl
  modified_base 10..12: mod_base = OTHER; note = 5-methyl
  modified_base 13: mod_base = OTHER; note = bicyclic nucleic acid (BNA)
  modified_base 18: mod_base = OTHER; note = bicyclic nucleic acid (BNA)
  source 1..18: mol_type = other DNA
ctgtccaagcccggttga

SEQ ID NO: 12811 - DNA, 18 bp, synthetic construct
  misc_feature 1..18: note = Description of Artificial Sequence: Synthetic Antisense oligonucleotide
  modified_base 1: mod_base = OTHER; note = 5-methyl
  modified_base 5..6: mod_base = OTHER; note = 5-methyl
  modified_base 10..12: mod_base = OTHER; note = 5-methyl
  modified_base 14: mod_base = OTHER; note = bicyclic nucleic acid (BNA)
  modified_base 18: mod_base = OTHER; note = bicyclic nucleic acid (BNA)
  source 1..18: mol_type = other DNA
ctgtccaagcccggttga

SEQ ID NO: 12812 - DNA, 18 bp, synthetic construct
  misc_feature 1..18: note = Description of Artificial Sequence: Synthetic Antisense oligonucleotide
  modified_base 6: mod_base = OTHER; note = bicyclic nucleic acid (BNA)
  modified_base 11: mod_base = OTHER; note = bicyclic nucleic acid (BNA)
  modified_base 18: mod_base = OTHER; note = bicyclic nucleic acid (BNA)
  modified_base 9: mod_base = OTHER; note = 5-methyl
  modified_base 13..14: mod_base = OTHER; note = 5-methyl
  modified_base 18: mod_base = OTHER; note = 5-methyl
  source 1..18: mol_type = other DNA
ggtaagttctgtccaagc

SEQ ID NO: 12813 - DNA, 18 bp, synthetic construct
  misc_feature 1..18: note = Description of Artificial Sequence: Synthetic Antisense oligonucleotide
  modified_base 9: mod_base = OTHER; note = 5-methyl
  modified_base 13..14: mod_base = OTHER; note = 5-methyl
  modified_base 18: mod_base = OTHER; note = 5-methyl
  modified_base 9: mod_base = OTHER; note = bicyclic nucleic acid (BNA)
  modified_base 14: mod_base = OTHER; note = bicyclic nucleic acid (BNA)
  modified_base 18: mod_base = OTHER; note = bicyclic nucleic acid (BNA)
  source 1..18: mol_type = other DNA
ggtaagttctgtccaagc

SEQ ID NO: 12814 - DNA, 18 bp, synthetic construct
  misc_feature 1..18: note = Description of Artificial Sequence: Synthetic Antisense oligonucleotide
  modified_base 2: mod_base = OTHER; note = bicyclic nucleic acid (BNA)
  modified_base 13: mod_base = OTHER; note = bicyclic nucleic acid (BNA)
  modified_base 18: mod_base = OTHER; note = bicyclic nucleic acid (BNA)
  modified_base 9: mod_base = OTHER; note = 5-methyl
  modified_base 13..14: mod_base = OTHER; note = 5-methyl
  modified_base 18: mod_base = OTHER; note = 5-methyl
  source 1..18: mol_type = other DNA
ggtaagttctgtccaagc

SEQ ID NO: 12815 - DNA, 18 bp, synthetic construct
  misc_feature 1..18: note = Description of Artificial Sequence: Synthetic Antisense oligonucleotide
  modified_base 9: mod_base = OTHER; note = 5-methyl
  modified_base 13..14: mod_base = OTHER; note = 5-methyl
  modified_base 18: mod_base = OTHER; note = 5-methyl
  modified_base 9: mod_base = OTHER; note = bicyclic nucleic acid (BNA)
  modified_base 13: mod_base = OTHER; note = bicyclic nucleic acid (BNA)
  modified_base 18: mod_base = OTHER; note = bicyclic nucleic acid (BNA)
  source 1..18: mol_type = other DNA
ggtaagttctgtccaagc

SEQ ID NO: 12816 - DNA, 18 bp, synthetic construct
  misc_feature 1..18: note = Description of Artificial Sequence: Synthetic Antisense oligonucleotide
  modified_base 9: mod_base = OTHER; note = 5-methyl
  modified_base 13..14: mod_base = OTHER; note = 5-methyl
  modified_base 18: mod_base = OTHER; note = 5-methyl
  modified_base 13..14: mod_base = OTHER; note = bicyclic nucleic acid (BNA)
  modified_base 18: mod_base = OTHER; note = bicyclic nucleic acid (BNA)
  source 1..18: mol_type = other DNA
ggtaagttctgtccaagc

SEQ ID NO: 12817 - DNA, 18 bp, synthetic construct
  misc_feature 1..18: note = Description of Artificial Sequence: Synthetic Antisense oligonucleotide
  modified_base 2: mod_base = OTHER; note = bicyclic nucleic acid (BNA)
  modified_base 14: mod_base = OTHER; note = bicyclic nucleic acid (BNA)
  modified_base 18: mod_base = OTHER; note = bicyclic nucleic acid (BNA)
  modified_base 9: mod_base = OTHER; note = 5-methyl
  modified_base 13..14: mod_base = OTHER; note = 5-methyl
  modified_base 18: mod_base = OTHER; note = 5-methyl
  source 1..18: mol_type = other DNA
ggtaagttctgtccaagc

SEQ ID NO: 12818 - DNA, 18 bp, synthetic construct
  misc_feature 1..18: note = Description of Artificial Sequence: Synthetic Antisense oligonucleotide
  modified_base 9: mod_base = OTHER; note = 5-methyl
  modified_base 13..14: mod_base = OTHER; note = 5-methyl
  modified_base 18: mod_base = OTHER; note = 5-methyl
  modified_base 11: mod_base = OTHER; note = bicyclic nucleic acid (BNA)
  modified_base 14: mod_base = OTHER; note = bicyclic nucleic acid (BNA)
  modified_base 18: mod_base = OTHER; note = bicyclic nucleic acid (BNA)
  source 1..18: mol_type = other DNA
ggtaagttctgtccaagc

SEQ ID NO: 12819 - DNA, 18 bp, synthetic construct
  misc_feature 1..18: note = Description of Artificial Sequence: Synthetic Antisense oligonucleotide
  modified_base 6: mod_base = OTHER; note = bicyclic nucleic acid (BNA)
  modified_base 13: mod_base = OTHER; note = bicyclic nucleic acid (BNA)
  modified_base 18: mod_base = OTHER; note = bicyclic nucleic acid (BNA)
  modified_base 9: mod_base = OTHER; note = 5-methyl
  modified_base 13..14: mod_base = OTHER; note = 5-methyl
  modified_base 18: mod_base = OTHER; note = 5-methyl
  source 1..18: mol_type = other DNA
ggtaagttctgtccaagc

SEQ ID NO: 12820 - DNA, 18 bp, synthetic construct
  misc_feature 1..18: note = Description of Artificial Sequence: Synthetic Antisense oligonucleotide
  modified_base 6: mod_base = OTHER; note = bicyclic nucleic acid (BNA)
  modified_base 14: mod_base = OTHER; note = bicyclic nucleic acid (BNA)
  modified_base 18: mod_base = OTHER; note = bicyclic nucleic acid (BNA)
  modified_base 9: mod_base = OTHER; note = 5-methyl
  modified_base 13..14: mod_base = OTHER; note = 5-methyl
  modified_base 18: mod_base = OTHER; note = 5-methyl
  source 1..18: mol_type = other DNA
ggtaagttctgtccaagc

SEQ ID NO: 12821 - DNA, 18 bp, synthetic construct
  misc_feature 1..18: note = Description of Artificial Sequence: Synthetic Antisense oligonucleotide
  modified_base 9: mod_base = OTHER; note = 5-methyl
  modified_base 13..14: mod_base = OTHER; note = 5-methyl
  modified_base 18: mod_base = OTHER; note = 5-methyl
  modified_base 9: mod_base = OTHER; note = bicyclic nucleic acid (BNA)
  modified_base 11: mod_base = OTHER; note = bicyclic nucleic acid (BNA)
  modified_base 18: mod_base = OTHER; note = bicyclic nucleic acid (BNA)
  source 1..18: mol_type = other DNA
ggtaagttctgtccaagc

SEQ ID NO: 12822 - DNA, 18 bp, synthetic construct
  misc_feature 1..18: note = Description of Artificial Sequence: Synthetic Antisense oligonucleotide
  modified_base 9: mod_base = OTHER; note = 5-methyl
  modified_base 13..14: mod_base = OTHER; note = 5-methyl
  modified_base 18: mod_base = OTHER; note = 5-methyl
  modified_base 11: mod_base = OTHER; note = bicyclic nucleic acid (BNA)
  modified_base 13: mod_base = OTHER; note = bicyclic nucleic acid (BNA)
  modified_base 18: mod_base = OTHER; note = bicyclic nucleic acid (BNA)
  source 1..18: mol_type = other DNA
ggtaagttctgtccaagc

SEQ ID NO: 12823 - DNA, 18 bp, synthetic construct
  misc_feature 1..18: note = Description of Artificial Sequence: Synthetic Antisense oligonucleotide
  modified_base 2: mod_base = OTHER; note = bicyclic nucleic acid (BNA)
  modified_base 6: mod_base = OTHER; note = bicyclic nucleic acid (BNA)
  modified_base 18: mod_base = OTHER; note = bicyclic nucleic acid (BNA)
  modified_base 9: mod_base = OTHER; note = 5-methyl
  modified_base 13..14: mod_base = OTHER; note = 5-methyl
  modified_base 18: mod_base = OTHER; note = 5-methyl
  source 1..18: mol_type = other DNA
ggtaagttctgtccaagc

SEQ ID NO: 12824 - DNA, 18 bp, synthetic construct
  misc_feature 1..18: note = Description of Artificial Sequence: Synthetic Antisense oligonucleotide
  modified_base 2: mod_base = OTHER; note = bicyclic nucleic acid (BNA)
  modified_base 9: mod_base = OTHER; note = bicyclic nucleic acid (BNA)
  modified_base 18: mod_base = OTHER; note = bicyclic nucleic acid (BNA)
  modified_base 9: mod_base = OTHER; note = 5-methyl
  modified_base 13..14: mod_base = OTHER; note = 5-methyl
  modified_base 18: mod_base = OTHER; note = 5-methyl
  source 1..18: mol_type = other DNA
ggtaagttctgtccaagc

SEQ ID NO: 12825 - DNA, 18 bp, synthetic construct
  misc_feature 1..18: note = Description of Artificial Sequence: Synthetic Antisense oligonucleotide
  modified_base 2: mod_base = OTHER; note = bicyclic nucleic acid (BNA)
  modified_base 11: mod_base = OTHER; note = bicyclic nucleic acid (BNA)
  modified_base 18: mod_base = OTHER; note = bicyclic nucleic acid (BNA)
  modified_base 9: mod_base = OTHER; note = 5-methyl
  modified_base 13..14: mod_base = OTHER; note = 5-methyl
  modified_base 18: mod_base = OTHER; note = 5-methyl
  source 1..18: mol_type = other DNA
ggtaagttctgtccaagc

SEQ ID NO: 12826 - DNA, 18 bp, synthetic construct
  misc_feature 1..18: note = Description of Artificial Sequence: Synthetic Antisense oligonucleotide
  modified_base 6: mod_base = OTHER; note = bicyclic nucleic acid (BNA)
  modified_base 9: mod_base = OTHER; note = bicyclic nucleic acid (BNA)
  modified_base 18: mod_base = OTHER; note = bicyclic nucleic acid (BNA)
  modified_base 9: mod_base = OTHER; note = 5-methyl
  modified_base 13..14: mod_base = OTHER; note = 5-methyl
  modified_base 18: mod_base = OTHER; note = 5-methyl
  source 1..18: mol_type = other DNA
ggtaagttctgtccaagc

SEQ ID NO: 12827 - DNA, 18 bp, synthetic construct
  misc_feature 1..18: note = Description of Artificial Sequence: Synthetic Antisense oligonucleotide
  modified_base 5: mod_base = OTHER; note = bicyclic nucleic acid (BNA)
  modified_base 8: mod_base = OTHER; note = bicyclic nucleic acid (BNA)
  modified_base 18: mod_base = OTHER; note = bicyclic nucleic acid (BNA)
  modified_base 8: mod_base = OTHER; note = 5-methyl
  modified_base 12..13: mod_base = OTHER; note = 5-methyl
  modified_base 17..18: mod_base = OTHER; note = 5-methyl
  source 1..18: mol_type = other DNA
gtaagttctgtccaagcc

SEQ ID NO: 12828 - DNA, 18 bp, synthetic construct
  misc_feature 1..18: note = Description of Artificial Sequence: Synthetic Antisense oligonucleotide
  modified_base 8: mod_base = OTHER; note = 5-methyl
  modified_base 12..13: mod_base = OTHER; note = 5-methyl
  modified_base 17..18: mod_base = OTHER; note = 5-methyl
  modified_base 13: mod_base = OTHER; note = bicyclic nucleic acid (BNA)
  modified_base 16: mod_base = OTHER; note = bicyclic nucleic acid (BNA)
  modified_base 18: mod_base = OTHER; note = bicyclic nucleic acid (BNA)
  source 1..18: mol_type = other DNA
gtaagttctgtccaagcc

SEQ ID NO: 12829 - DNA, 18 bp, synthetic construct
  misc_feature 1..18: note = Description of Artificial Sequence: Synthetic Antisense oligonucleotide
  modified_base 5: mod_base = OTHER; note = bicyclic nucleic acid (BNA)
  modified_base 10: mod_base = OTHER; note = bicyclic nucleic acid (BNA)
  modified_base 18: mod_base = OTHER; note = bicyclic nucleic acid (BNA)
  modified_base 8: mod_base = OTHER; note = 5-methyl
  modified_base 12..13: mod_base = OTHER; note = 5-methyl
  modified_base 17..18: mod_base = OTHER; note = 5-methyl
  source 1..18: mol_type = other DNA
gtaagttctgtccaagcc

SEQ ID NO: 12830 - DNA, 18 bp, synthetic construct
  misc_feature 1..18: note = Description of Artificial Sequence: Synthetic Antisense oligonucleotide
  modified_base 8: mod_base = OTHER; note = 5-methyl
  modified_base 12..13: mod_base = OTHER; note = 5-methyl
  modified_base 17..18: mod_base = OTHER; note = 5-methyl
  modified_base 8: mod_base = OTHER; note = bicyclic nucleic acid (BNA)
  modified_base 16: mod_base = OTHER; note = bicyclic nucleic acid (BNA)
  modified_base 18: mod_base = OTHER; note = bicyclic nucleic acid (BNA)
  source 1..18: mol_type = other DNA
gtaagttctgtccaagcc

SEQ ID NO: 12831 - DNA, 18 bp, synthetic construct
  misc_feature 1..18: note = Description of Artificial Sequence: Synthetic Antisense oligonucleotide
  modified_base 8: mod_base = OTHER; note = 5-methyl
  modified_base 12..13: mod_base = OTHER; note = 5-methyl
  modified_base 17..18: mod_base = OTHER; note = 5-methyl
  modified_base 10: mod_base = OTHER; note = bicyclic nucleic acid (BNA)
  modified_base 16: mod_base = OTHER; note = bicyclic nucleic acid (BNA)
  modified_base 18: mod_base = OTHER; note = bicyclic nucleic acid (BNA)
  source 1..18: mol_type = other DNA
gtaagttctgtccaagcc

SEQ ID NO: 12832 - DNA, 18 bp, synthetic construct
  misc_feature 1..18: note = Description of Artificial Sequence: Synthetic Antisense oligonucleotide
  modified_base 8: mod_base = OTHER; note = 5-methyl
  modified_base 12..13: mod_base = OTHER; note = 5-methyl
  modified_base 17..18: mod_base = OTHER; note = 5-methyl
  modified_base 8: mod_base = OTHER; note = bicyclic nucleic acid (BNA)
  modified_base 13: mod_base = OTHER; note = bicyclic nucleic acid (BNA)
  modified_base 18: mod_base = OTHER; note = bicyclic nucleic acid (BNA)
  source 1..18: mol_type = other DNA
gtaagttctgtccaagcc

SEQ ID NO: 12833 - DNA, 18 bp, synthetic construct
  misc_feature 1..18: note = Description of Artificial Sequence: Synthetic Antisense oligonucleotide
  modified_base 5: mod_base = OTHER; note = bicyclic nucleic acid (BNA)
  modified_base 16: mod_base = OTHER; note = bicyclic nucleic acid (BNA)
  modified_base 18: mod_base = OTHER; note = bicyclic nucleic acid (BNA)
  modified_base 8: mod_base = OTHER; note = 5-methyl
  modified_base 12..13: mod_base = OTHER; note = 5-methyl
  modified_base 17..18: mod_base = OTHER; note = 5-methyl
  source 1..18: mol_type = other DNA
gtaagttctgtccaagcc

SEQ ID NO: 12834 - DNA, 18 bp, synthetic construct
  misc_feature 1..18: note = Description of Artificial Sequence: Synthetic Antisense oligonucleotide
  modified_base 8: mod_base = OTHER; note = 5-methyl
  modified_base 12..13: mod_base = OTHER; note = 5-methyl
  modified_base 17..18: mod_base = OTHER; note = 5-methyl
  modified_base 10: mod_base = OTHER; note = bicyclic nucleic acid (BNA)
  modified_base 13: mod_base = OTHER; note = bicyclic nucleic acid (BNA)
  modified_base 18: mod_base = OTHER; note = bicyclic nucleic acid (BNA)
  source 1..18: mol_type = other DNA
gtaagttctgtccaagcc

SEQ ID NO: 12835 - DNA, 18 bp, synthetic construct
  misc_feature 1..18: note = Description of Artificial Sequence: Synthetic Antisense oligonucleotide
  modified_base 5: mod_base = OTHER; note = bicyclic nucleic acid (BNA)
  modified_base 13: mod_base = OTHER; note = bicyclic nucleic acid (BNA)
  modified_base 18: mod_base = OTHER; note = bicyclic nucleic acid (BNA)
  modified_base 8: mod_base = OTHER; note = 5-methyl
  modified_base 12..13: mod_base = OTHER; note = 5-methyl
  modified_base 17..18: mod_base = OTHER; note = 5-methyl
  source 1..18: mol_type = other DNA
gtaagttctgtccaagcc

SEQ ID NO: 12836 - DNA, 18 bp, synthetic construct
  misc_feature 1..18: note = Description of Artificial Sequence: Synthetic Antisense oligonucleotide
  modified_base 8: mod_base = OTHER; note = 5-methyl
  modified_base 12..13: mod_base = OTHER; note = 5-methyl
  modified_base 17..18: mod_base = OTHER; note = 5-methyl
  modified_base 10: mod_base = OTHER; note = bicyclic nucleic acid (BNA)
  modified_base 12: mod_base = OTHER; note = bicyclic nucleic acid (BNA)
  modified_base 18: mod_base = OTHER; note = bicyclic nucleic acid (BNA)
  source 1..18: mol_type = other DNA
gtaagttctgtccaagcc

SEQ ID NO: 12837 - DNA, 18 bp, synthetic construct
  misc_feature 1..18: note = Description of Artificial Sequence: Synthetic Antisense oligonucleotide
  modified_base 8: mod_base = OTHER; note = 5-methyl
  modified_base 12..13: mod_base = OTHER; note = 5-methyl
  modified_base 17..18: mod_base = OTHER; note = 5-methyl
  modified_base 8: mod_base = OTHER; note = bicyclic nucleic acid (BNA)
  modified_base 12: mod_base = OTHER; note = bicyclic nucleic acid (BNA)
  modified_base 18: mod_base = OTHER; note = bicyclic nucleic acid (BNA)
  source 1..18: mol_type = other DNA
gtaagttctgtccaagcc

SEQ ID NO: 12838 - DNA, 18 bp, synthetic construct
  misc_feature 1..18: note = Description of Artificial Sequence: Synthetic Antisense oligonucleotide
  modified_base 8: mod_base = OTHER; note = 5-methyl
  modified_base 12..13: mod_base = OTHER; note = 5-methyl
  modified_base 17..18: mod_base = OTHER; note = 5-methyl
  modified_base 12: mod_base = OTHER; note = bicyclic nucleic acid (BNA)
  modified_base 16: mod_base = OTHER; note = bicyclic nucleic acid (BNA)
  modified_base 18: mod_base = OTHER; note = bicyclic nucleic acid (BNA)
  source 1..18: mol_type = other DNA
gtaagttctgtccaagcc

SEQ ID NO: 12839 - DNA, 18 bp, synthetic construct
  misc_feature 1..18: note = Description of Artificial Sequence: Synthetic Antisense oligonucleotide
  modified_base 8: mod_base = OTHER; note = 5-methyl
  modified_base 12..13: mod_base = OTHER; note = 5-methyl
  modified_base 17..18: mod_base = OTHER; note = 5-methyl
  modified_base 12..13: mod_base = OTHER; note = bicyclic nucleic acid (BNA)
  modified_base 18: mod_base = OTHER; note = bicyclic nucleic acid (BNA)
  source 1..18: mol_type = other DNA
gtaagttctgtccaagcc

SEQ ID NO: 12840 - DNA, 18 bp, synthetic construct
  misc_feature 1..18: note = Description of Artificial Sequence: Synthetic Antisense oligonucleotide
  modified_base 5: mod_base = OTHER; note = bicyclic nucleic acid (BNA)
  modified_base 12: mod_base = OTHER; note = bicyclic nucleic acid (BNA)
  modified_base 18: mod_base = OTHER; note = bicyclic nucleic acid (BNA)
  modified_base 8: mod_base = OTHER; note = 5-methyl
  modified_base 12..13: mod_base = OTHER; note = 5-methyl
  modified_base 17..18: mod_base = OTHER; note = 5-methyl
  source 1..18: mol_type = other DNA
gtaagttctgtccaagcc

SEQ ID NO: 12841 - DNA, 18 bp, synthetic construct
  misc_feature 1..18: note = Description of Artificial Sequence: Synthetic Antisense oligonucleotide
  modified_base 8: mod_base = OTHER; note = 5-methyl
  modified_base 12..13: mod_base = OTHER; note = 5-methyl
  modified_base 17..18: mod_base = OTHER; note = 5-methyl
  modified_base 8: mod_base = OTHER; note = bicyclic nucleic acid (BNA)
  modified_base 10: mod_base = OTHER; note = bicyclic nucleic acid (BNA)
  modified_base 18: mod_base = OTHER; note = bicyclic nucleic acid (BNA)
  source 1..18: mol_type = other DNA
gtaagttctgtccaagcc

SEQ ID NO: 12842 - DNA, 18 bp, synthetic construct
  misc_feature 1..18: note = Description of Artificial Sequence: Synthetic Antisense oligonucleotide
  modified_base 4: mod_base = OTHER; note = 5-methyl
  modified_base 13: mod_base = OTHER; note = 5-methyl
  modified_base 17..18: mod_base = OTHER; note = 5-methyl
  modified_base 6: mod_base = OTHER; note = bicyclic nucleic acid (BNA)
  modified_base 10: mod_base = OTHER; note = bicyclic nucleic acid (BNA)
  modified_base 18: mod_base = OTHER; note = bicyclic nucleic acid (BNA)
  source 1..18: mol_type = other DNA
agtcggtaagttctgtcc

SEQ ID NO: 12843 - DNA, 18 bp, synthetic construct
  misc_feature 1..18: note = Description of Artificial Sequence: Synthetic Antisense oligonucleotide
  modified_base 2: mod_base = OTHER; note = bicyclic nucleic acid (BNA)
  modified_base 4: mod_base = OTHER; note = bicyclic nucleic acid (BNA)
  modified_base 18: mod_base = OTHER; note = bicyclic nucleic acid (BNA)
  modified_base 4: mod_base = OTHER; note = 5-methyl
  modified_base 13: mod_base = OTHER; note = 5-methyl
  modified_base 17..18: mod_base = OTHER; note = 5-methyl
  source 1..18: mol_type = other DNA
agtcggtaagttctgtcc

SEQ ID NO: 12844 - DNA, 18 bp, synthetic construct
  misc_feature 1..18: note = Description of Artificial Sequence: Synthetic Antisense oligonucleotide
  modified_base 4: mod_base = OTHER; note = 5-methyl
  modified_base 13: mod_base = OTHER; note = 5-methyl
  modified_base 17..18: mod_base = OTHER; note = 5-methyl
  modified_base 5: mod_base = OTHER; note = bicyclic nucleic acid (BNA)
  modified_base 13: mod_base = OTHER; note = bicyclic nucleic acid (BNA)
  modified_base 18: mod_base = OTHER; note = bicyclic nucleic acid (BNA)
  source 1..18: mol_type = other DNA
agtcggtaagttctgtcc

SEQ ID NO: 12845 - DNA, 18 bp, synthetic construct
  misc_feature 1..18: note = Description of Artificial Sequence: Synthetic Antisense oligonucleotide
  modified_base 4: mod_base = OTHER; note = 5-methyl
  modified_base 13: mod_base = OTHER; note = 5-methyl
  modified_base 17..18: mod_base = OTHER; note = 5-methyl
  modified_base 4: mod_base = OTHER; note = bicyclic nucleic acid (BNA)
  modified_base 15: mod_base = OTHER; note = bicyclic nucleic acid (BNA)
  modified_base 18: mod_base = OTHER; note = bicyclic nucleic acid (BNA)
  source 1..18: mol_type = other DNA
agtcggtaagttctgtcc

SEQ ID NO: 12846 - DNA, 18 bp, synthetic construct
  misc_feature 1..18: note = Description of Artificial Sequence: Synthetic Antisense oligonucleotide
  modified_base 4: mod_base = OTHER; note = 5-methyl
  modified_base 13: mod_base = OTHER; note = 5-methyl
  modified_base 17..18: mod_base = OTHER; note = 5-methyl
  modified_base 5: mod_base = OTHER; note = bicyclic nucleic acid (BNA)
  modified_base 10: mod_base = OTHER; note = bicyclic nucleic acid (BNA)
  modified_base 18: mod_base = OTHER; note = bicyclic nucleic acid (BNA)
  source 1..18: mol_type = other DNA
agtcggtaagttctgtcc

SEQ ID NO: 12847 - DNA, 18 bp, synthetic construct
  misc_feature 1..18: note = Description of Artificial Sequence: Synthetic Antisense oligonucleotide
  modified_base 4: mod_base = OTHER; note = 5-methyl
  modified_base 13: mod_base = OTHER; note = 5-methyl
  modified_base 17..18: mod_base = OTHER; note = 5-methyl
  modified_base 6: mod_base = OTHER; note = bicyclic nucleic acid (BNA)
  modified_base 13: mod_base = OTHER; note = bicyclic nucleic acid (BNA)
  modified_base 18: mod_base = OTHER; note = bicyclic nucleic acid (BNA)
  source 1..18: mol_type = other DNA
agtcggtaagttctgtcc

SEQ ID NO: 12848 - DNA, 18 bp, synthetic construct
  misc_feature 1..18: note = Description of Artificial Sequence: Synthetic Antisense oligonucleotide
  modified_base 2: mod_base = OTHER; note = bicyclic nucleic acid (BNA)
  modified_base 15: mod_base = OTHER; note = bicyclic nucleic acid (BNA)
  modified_base 18: mod_base = OTHER; note = bicyclic nucleic acid (BNA)
  modified_base 4: mod_base = OTHER; note = 5-methyl
  modified_base 13: mod_base = OTHER; note = 5-methyl
  modified_base 17..18: mod_base = OTHER; note = 5-methyl
  source 1..18: mol_type = other DNA
agtcggtaagttctgtcc

SEQ ID NO: 12849 - DNA, 18 bp, synthetic construct
  misc_feature 1..18: note = Description of Artificial Sequence: Synthetic Antisense oligonucleotide
  modified_base 2: mod_base = OTHER; note = bicyclic nucleic acid (BNA)
  modified_base 6: mod_base = OTHER; note = bicyclic nucleic acid (BNA)
  modified_base 18: mod_base = OTHER; note = bicyclic nucleic acid (BNA)
  modified_base 4: mod_base = OTHER; note = 5-methyl
  modified_base 13: mod_base = OTHER; note = 5-methyl
  modified_base 17..18: mod_base = OTHER; note = 5-methyl
  source 1..18: mol_type = other DNA
agtcggtaagttctgtcc

SEQ ID NO: 12850 - DNA, 18 bp, synthetic construct
  misc_feature 1..18: note = Description of Artificial Sequence: Synthetic Antisense oligonucleotide
  modified_base 4: mod_base = OTHER; note = 5-methyl
  modified_base 13: mod_base = OTHER; note = 5-methyl
  modified_base 17..18: mod_base = OTHER; note = 5-methyl
  modified_base 10: mod_base = OTHER; note = bicyclic nucleic acid (BNA)
  modified_base 15: mod_base = OTHER; note = bicyclic nucleic acid (BNA)
  modified_base 18: mod_base = OTHER; note = bicyclic nucleic acid (BNA)
  source 1..18: mol_type = other DNA
agtcggtaagttctgtcc

SEQ ID NO: 12851 - DNA, 18 bp, synthetic construct
  misc_feature 1..18: note = Description of Artificial Sequence: Synthetic Antisense oligonucleotide
  modified_base 4: mod_base = OTHER; note = 5-methyl
  modified_base 13: mod_base = OTHER; note = 5-methyl
  modified_base 17..18: mod_base = OTHER; note = 5-methyl
  modified_base 13: mod_base = OTHER; note = bicyclic nucleic acid (BNA)
  modified_base 15: mod_base = OTHER; note = bicyclic nucleic acid (BNA)
  modified_base 18: mod_base = OTHER; note = bicyclic nucleic acid (BNA)
  source 1..18: mol_type = other DNA
agtcggtaagttctgtcc

SEQ ID NO: 12852 - DNA, 18 bp, synthetic construct
  misc_feature 1..18: note = Description of Artificial Sequence: Synthetic Antisense oligonucleotide
  modified_base 4: mod_base = OTHER; note = 5-methyl
  modified_base 13: mod_base = OTHER; note = 5-methyl
  modified_base 17..18: mod_base = OTHER; note = 5-methyl
  modified_base 5..6: mod_base = OTHER; note = bicyclic nucleic acid (BNA)
  modified_base 18: mod_base = OTHER; note = bicyclic nucleic acid (BNA)
  source 1..18: mol_type = other DNA
agtcggtaagttctgtcc

SEQ ID NO: 12853 - DNA, 18 bp, synthetic construct
  misc_feature 1..18: note = Description of Artificial Sequence: Synthetic Antisense oligonucleotide
  modified_base 4: mod_base = OTHER; note = 5-methyl
  modified_base 13: mod_base = OTHER; note = 5-methyl
  modified_base 17..18: mod_base = OTHER; note = 5-methyl
  modified_base 5: mod_base = OTHER; note = bicyclic nucleic acid (BNA)
  modified_base 15: mod_base = OTHER; note = bicyclic nucleic acid (BNA)
  modified_base 18: mod_base = OTHER; note = bicyclic nucleic acid (BNA)
  source 1..18: mol_type = other DNA
agtcggtaagttctgtcc

SEQ ID NO: 12854 - DNA, 18 bp, synthetic construct
  misc_feature 1..18: note = Description of Artificial Sequence: Synthetic Antisense oligonucleotide
  modified_base 2: mod_base = OTHER; note = bicyclic nucleic acid (BNA)
  modified_base 5: mod_base = OTHER; note = bicyclic nucleic acid (BNA)
  modified_base 18: mod_base = OTHER; note = bicyclic nucleic acid (BNA)
  modified_base 4: mod_base = OTHER; note = 5-methyl
  modified_base 13: mod_base = OTHER; note = 5-methyl
  modified_base 17..18: mod_base = OTHER; note = 5-methyl
  source 1..18: mol_type = other DNA
agtcggtaagttctgtcc

SEQ ID NO: 12855 - DNA, 18 bp, synthetic construct
  misc_feature 1..18: note = Description of Artificial Sequence: Synthetic Antisense oligonucleotide
  modified_base 4: mod_base = OTHER; note = 5-methyl
  modified_base 13: mod_base = OTHER; note = 5-methyl
  modified_base 17..18: mod_base = OTHER; note = 5-methyl
  modified_base 4: mod_base = OTHER; note = bicyclic nucleic acid (BNA)
  modified_base 10: mod_base = OTHER; note = bicyclic nucleic acid (BNA)
  modified_base 18: mod_base = OTHER; note = bicyclic nucleic acid (BNA)
  source 1..18: mol_type = other DNA
agtcggtaagttctgtcc

SEQ ID NO: 12856 - DNA, 18 bp, synthetic construct
  misc_feature 1..18: note = Description of Artificial Sequence: Synthetic Antisense oligonucleotide
  modified_base 2: mod_base = OTHER; note = bicyclic nucleic acid (BNA)
  modified_base 10: mod_base = OTHER; note = bicyclic nucleic acid (BNA)
  modified_base 18: mod_base = OTHER; note = bicyclic nucleic acid (BNA)
  modified_base 4: mod_base = OTHER; note = 5-methyl
  modified_base 13: mod_base = OTHER; note = 5-methyl
  modified_base 17..18: mod_base = OTHER; note = 5-methyl
  source 1..18: mol_type = other DNA
agtcggtaagttctgtcc

SEQ ID NO: 12857 - DNA, 18 bp, synthetic construct
  misc_feature 1..18: note = Description of Artificial Sequence: Synthetic Antisense oligonucleotide
  modified_base 4: mod_base = OTHER; note = 5-methyl
  modified_base 13: mod_base = OTHER; note = 5-methyl
  modified_base 17..18: mod_base = OTHER; note = 5-methyl
  modified_base 4: mod_base = OTHER; note = bicyclic nucleic acid (BNA)
  modified_base 6: mod_base = OTHER; note = bicyclic nucleic acid (BNA)
  modified_base 18: mod_base = OTHER; note = bicyclic nucleic acid (BNA)
  source 1..18: mol_type = other DNA
agtcggtaagttctgtcc

SEQ ID NO: 12858 - DNA, 18 bp, synthetic construct
  misc_feature 1..18: note = Description of Artificial Sequence: Synthetic Antisense oligonucleotide
  modified_base 4: mod_base = OTHER; note = 5-methyl
  modified_base 13: mod_base = OTHER; note = 5-methyl
  modified_base 17..18: mod_base = OTHER; note = 5-methyl
  modified_base 4: mod_base = OTHER; note = bicyclic nucleic acid (BNA)
  modified_base 13: mod_base = OTHER; note = bicyclic nucleic acid (BNA)
  modified_base 18: mod_base = OTHER; note = bicyclic nucleic acid (BNA)
  source 1..18: mol_type = other DNA
agtcggtaagttctgtcc

SEQ ID NO: 12859 - DNA, 18 bp, synthetic construct
  misc_feature 1..18: note = Description of Artificial Sequence: Synthetic Antisense oligonucleotide
  modified_base 2: mod_base = OTHER; note = bicyclic nucleic acid (BNA)
  modified_base 13: mod_base = OTHER; note = bicyclic nucleic acid (BNA)
  modified_base 18: mod_base = OTHER; note = bicyclic nucleic acid (BNA)
  modified_base 4: mod_base = OTHER; note = 5-methyl
  modified_base 13: mod_base = OTHER; note = 5-methyl
  modified_base 17..18: mod_base = OTHER; note = 5-methyl
  source 1..18: mol_type = other DNA
agtcggtaagttctgtcc

SEQ ID NO: 12860 - DNA, 18 bp, synthetic construct
  misc_feature 1..18: note = Description of Artificial Sequence: Synthetic Antisense oligonucleotide
  modified_base 4: mod_base = OTHER; note = 5-methyl
  modified_base 13: mod_base = OTHER; note = 5-methyl
  modified_base 17..18: mod_base = OTHER; note = 5-methyl
  modified_base 6: mod_base = OTHER; note = bicyclic nucleic acid (BNA)
  modified_base 15: mod_base = OTHER; note = bicyclic nucleic acid (BNA)
  modified_base 18: mod_base = OTHER; note = bicyclic nucleic acid (BNA)
  source 1..18: mol_type = other DNA
agtcggtaagttctgtcc

SEQ ID NO: 12861 - DNA, 18 bp, synthetic construct
  misc_feature 1..18: note = Description of Artificial Sequence: Synthetic Antisense oligonucleotide
  modified_base 4: mod_base = OTHER; note = 5-methyl
  modified_base 13: mod_base = OTHER; note = 5-methyl
  modified_base 17..18: mod_base = OTHER; note = 5-methyl
  modified_base 4..5: mod_base = OTHER; note = bicyclic nucleic acid (BNA)
  modified_base 18: mod_base = OTHER; note = bicyclic nucleic acid (BNA)
  source 1..18: mol_type = other DNA
agtcggtaagttctgtcc

SEQ ID NO: 12862 - DNA, 18 bp, synthetic construct
  misc_feature 1..18: note = Description of Artificial Sequence: Synthetic Antisense oligonucleotide
  modified_base 4: mod_base = OTHER; note = 5-methyl
  modified_base 13: mod_base = OTHER; note = 5-methyl
  modified_base 17..18: mod_base = OTHER; note = 5-methyl
  modified_base 10: mod_base = OTHER; note = bicyclic nucleic acid (BNA)
  modified_base 13: mod_base = OTHER; note = bicyclic nucleic acid (BNA)
  modified_base 18: mod_base = OTHER; note = bicyclic nucleic acid (BNA)
  source 1..18: mol_type = other DNA
agtcggtaagttctgtcc

SEQ ID NO: 12863 - DNA, 18 bp, synthetic construct
  misc_feature 1..18: note = Description of Artificial Sequence: Synthetic Antisense oligonucleotide
  modified_base 1: mod_base = OTHER; note = 5-methyl
  modified_base 5..6: mod_base = OTHER; note = 5-methyl
  modified_base 10..12: mod_base = OTHER; note = 5-methyl
  modified_base 6: mod_base = OTHER; note = bicyclic nucleic acid (BNA)
  modified_base 10: mod_base = OTHER; note = bicyclic nucleic acid (BNA)
  modified_base 18: mod_base = OTHER; note = bicyclic nucleic acid (BNA)
  source 1..18: mol_type = other DNA
ctgtccaagcccggttga

SEQ ID NO: 12864 - DNA, 18 bp, synthetic construct
  misc_feature 1..18: note = Description of Artificial Sequence: Synthetic Antisense oligonucleotide
  modified_base 1: mod_base = OTHER; note = 5-methyl
  modified_base 5..6: mod_base = OTHER; note = 5-methyl
  modified_base 10..12: mod_base = OTHER; note = 5-methyl
  modified_base 9: mod_base = OTHER; note = bicyclic nucleic acid (BNA)
  modified_base 14: mod_base = OTHER; note = bicyclic nucleic acid (BNA)
  modified_base 18: mod_base = OTHER; note = bicyclic nucleic acid (BNA)
  source 1..18: mol_type = other DNA
ctgtccaagcccggttga

SEQ ID NO: 12865 - DNA, 18 bp, synthetic construct
  misc_feature 1..18: note = Description of Artificial Sequence: Synthetic Antisense oligonucleotide
  modified_base 1: mod_base = OTHER; note = 5-methyl
  modified_base 5..6: mod_base = OTHER; note = 5-methyl
  modified_base 10..12: mod_base = OTHER; note = 5-methyl
  modified_base 11..12: mod_base = OTHER; note = bicyclic nucleic acid (BNA)
  modified_base 18: mod_base = OTHER; note = bicyclic nucleic acid (BNA)
  source 1..18: mol_type = other DNA
ctgtccaagcccggttga

SEQ ID NO: 12866 - DNA, 18 bp, synthetic construct
  misc_feature 1..18: note = Description of Artificial Sequence: Synthetic Antisense oligonucleotide
  modified_base 1: mod_base = OTHER; note = 5-methyl
  modified_base 5..6: mod_base = OTHER; note = 5-methyl
  modified_base 10..12: mod_base = OTHER; note = 5-methyl
  modified_base 5: mod_base = OTHER; note = bicyclic nucleic acid (BNA)
  modified_base 9: mod_base = OTHER; note = bicyclic nucleic acid (BNA)
  modified_base 18: mod_base = OTHER; note = bicyclic nucleic acid (BNA)
  source 1..18: mol_type = other DNA
ctgtccaagcccggttga

SEQ ID NO: 12867 - DNA, 18 bp, synthetic construct
  misc_feature 1..18: note = Description of Artificial Sequence: Synthetic Antisense oligonucleotide
  modified_base 1: mod_base = OTHER; note = 5-methyl
  modified_base 5..6: mod_base = OTHER; note = 5-methyl
  modified_base 10..12: mod_base = OTHER; note = 5-methyl
  modified_base 3: mod_base = OTHER; note = bicyclic nucleic acid (BNA)
  modified_base 9: mod_base = OTHER; note = bicyclic nucleic acid (BNA)
  modified_base 18: mod_base = OTHER; note = bicyclic nucleic acid (BNA)
  source 1..18: mol_type = other DNA
ctgtccaagcccggttga

SEQ ID NO: 12868 - DNA, 18 bp, synthetic construct
  misc_feature 1..18: note = Description of Artificial Sequence: Synthetic Antisense oligonucleotide
  modified_base 1: mod_base = OTHER; note = 5-methyl
  modified_base 5..6: mod_base = OTHER; note = 5-methyl
  modified_base 10..12: mod_base = OTHER; note = 5-methyl
  modified_base 6: mod_base = OTHER; note = bicyclic nucleic acid (BNA)
  modified_base 14: mod_base = OTHER; note = bicyclic nucleic acid (BNA)
  modified_base 18: mod_base = OTHER; note = bicyclic nucleic acid (BNA)
  source 1..18: mol_type = other DNA
ctgtccaagcccggttga

SEQ ID NO: 12869 - DNA, 18 bp, synthetic construct
  misc_feature 1..18: note = Description of Artificial Sequence: Synthetic Antisense oligonucleotide
  modified_base 1: mod_base = OTHER; note = 5-methyl
  modified_base 5..6: mod_base = OTHER; note = 5-methyl
  modified_base 10..12: mod_base = OTHER; note = 5-methyl
  modified_base 9..10: mod_base = OTHER; note = bicyclic nucleic acid (BNA)
  modified_base 18: mod_base = OTHER; note = bicyclic nucleic acid (BNA)
  source 1..18: mol_type = other DNA
ctgtccaagcccggttga

SEQ ID NO: 12870 - DNA, 18 bp, synthetic construct
  misc_feature 1..18: note = Description of Artificial Sequence: Synthetic Antisense oligonucleotide
  modified_base 1: mod_base = OTHER; note = 5-methyl
  modified_base 5..6: mod_base = OTHER; note = 5-methyl
  modified_base 10..12: mod_base = OTHER; note = 5-methyl
  modified_base 5: mod_base = OTHER; note = bicyclic nucleic acid (BNA)
  modified_base 13: mod_base = OTHER; note = bicyclic nucleic acid (BNA)
  modified_base 18: mod_base = OTHER; note = bicyclic nucleic acid (BNA)
  source 1..18: mol_type = other DNA
ctgtccaagcccggttga

SEQ ID NO: 12871 - DNA, 18 bp, synthetic construct
  misc_feature 1..18: note = Description of Artificial Sequence: Synthetic Antisense oligonucleotide
  modified_base 1: mod_base = OTHER; note = 5-methyl
  modified_base 5..6: mod_base = OTHER; note = 5-methyl
  modified_base 10..12: mod_base = OTHER; note = 5-methyl
  modified_base 3: mod_base = OTHER; note = bicyclic nucleic acid (BNA)
  modified_base 13: mod_base = OTHER; note = bicyclic nucleic acid (BNA)
  modified_base 18: mod_base = OTHER; note = bicyclic nucleic acid (BNA)
  source 1..18: mol_type = other DNA
ctgtccaagcccggttga

SEQ ID NO: 12872 - DNA, 18 bp, synthetic construct
  misc_feature 1..18: note = Description of Artificial Sequence: Synthetic Antisense oligonucleotide
  modified_base 1: mod_base = OTHER; note = 5-methyl
  modified_base 5..6: mod_base = OTHER; note = 5-methyl
  modified_base 10..12: mod_base = OTHER; note = 5-methyl
  modified_base 3: mod_base = OTHER; note = bicyclic nucleic acid (BNA)
  modified_base 6: mod_base = OTHER; note = bicyclic nucleic acid (BNA)
  modified_base 18: mod_base = OTHER; note = bicyclic nucleic acid (BNA)
  source 1..18: mol_type = other DNA
ctgtccaagcccggttga

SEQ ID NO: 12873 - DNA, 18 bp, synthetic construct
  misc_feature 1..18: note = Description of Artificial Sequence: Synthetic Antisense oligonucleotide
  modified_base 1: mod_base = OTHER; note = 5-methyl
  modified_base 5..6: mod_base = OTHER; note = 5-methyl
  modified_base 10..12: mod_base = OTHER; note = 5-methyl
  modified_base 6: mod_base = OTHER; note = bicyclic nucleic acid (BNA)
  modified_base 9: mod_base = OTHER; note = bicyclic nucleic acid (BNA)
  modified_base 18: mod_base = OTHER; note = bicyclic nucleic acid (BNA)
  source 1..18: mol_type = other DNA
ctgtccaagcccggttga

SEQ ID NO: 12874 - DNA, 18 bp, synthetic construct
  misc_feature 1..18: note = Description of Artificial Sequence: Synthetic Antisense oligonucleotide
  modified_base 1: mod_base = OTHER; note = 5-methyl
  modified_base 5..6: mod_base = OTHER; note = 5-methyl
  modified_base 10..12: mod_base = OTHER; note = 5-methyl
  modified_base 5: mod_base = OTHER; note = bicyclic nucleic acid (BNA)
  modified_base 10: mod_base = OTHER; note = bicyclic nucleic acid (BNA)
  modified_base 18: mod_base = OTHER; note = bicyclic nucleic acid (BNA)
  source 1..18: mol_type = other DNA
ctgtccaagcccggttga

SEQ ID NO: 12875 - DNA, 18 bp, synthetic construct
  misc_feature 1..18: note = Description of Artificial Sequence: Synthetic Antisense oligonucleotide
  modified_base 1: mod_base = OTHER; note = 5-methyl
  modified_base 5..6: mod_base = OTHER; note = 5-methyl
  modified_base 10..12: mod_base = OTHER; note = 5-methyl
  modified_base 3: mod_base = OTHER; note = bicyclic nucleic acid (BNA)
  modified_base 10: mod_base = OTHER; note = bicyclic nucleic acid (BNA)
  modified_base 18: mod_base = OTHER; note = bicyclic nucleic acid (BNA)
  source 1..18: mol_type = other DNA
ctgtccaagcccggttga

SEQ ID NO: 12876 - DNA, 18 bp, synthetic construct
  misc_feature 1..18: note = Description of Artificial Sequence: Synthetic Antisense oligonucleotide
  modified_base 1: mod_base = OTHER; note = 5-methyl
  modified_base 5..6: mod_base = OTHER; note = 5-methyl
  modified_base 10..12: mod_base = OTHER; note = 5-methyl
  modified_base 13..14: mod_base = OTHER; note = bicyclic nucleic acid (BNA)
  modified_base 18: mod_base = OTHER; note = bicyclic nucleic acid (BNA)
  source 1..18: mol_type = other DNA
ctgtccaagcccggttga

SEQ ID NO: 12877 - DNA, 18 bp, synthetic construct
  misc_feature 1..18: note = Description of Artificial Sequence: Synthetic Antisense oligonucleotide
  modified_base 1: mod_base = OTHER; note = 5-methyl
  modified_base 5..6: mod_base = OTHER; note = 5-methyl
  modified_base 10..12: mod_base = OTHER; note = 5-methyl
  modified_base 6: mod_base = OTHER; note = bicyclic nucleic acid (BNA)
  modified_base 13: mod_base = OTHER; note = bicyclic nucleic acid (BNA)
  modified_base 18: mod_base = OTHER; note = bicyclic nucleic acid (BNA)
  source 1..18: mol_type = other DNA
ctgtccaagcccggttga

SEQ ID NO: 12878 - DNA, 18 bp, synthetic construct
  misc_feature 1..18: note = Description of Artificial Sequence: Synthetic Antisense oligonucleotide
  modified_base 1: mod_base = OTHER; note = 5-methyl
  modified_base 5..6: mod_base = OTHER; note = 5-methyl
  modified_base 10..12: mod_base = OTHER; note = 5-methyl
  modified_base 9: mod_base = OTHER; note = bicyclic nucleic acid (BNA)
  modified_base 11: mod_base = OTHER; note = bicyclic nucleic acid (BNA)
  modified_base 18: mod_base = OTHER; note = bicyclic nucleic acid (BNA)
  source 1..18: mol_type = other DNA
ctgtccaagcccggttga

SEQ ID NO: 12879 - DNA, 18 bp, synthetic construct
  misc_feature 1..18: note = Description of Artificial Sequence: Synthetic Antisense oligonucleotide
  modified_base 1: mod_base = OTHER; note = 5-methyl
  modified_base 5..6: mod_base = OTHER; note = 5-methyl
  modified_base 10..12: mod_base = OTHER; note = 5-methyl
  modified_base 11: mod_base = OTHER; note = bicyclic nucleic acid (BNA)
  modified_base 13: mod_base = OTHER; note = bicyclic nucleic acid (BNA)
  modified_base 18: mod_base = OTHER; note = bicyclic nucleic acid (BNA)
  source 1..18: mol_type = other DNA
ctgtccaagcccggttga

SEQ ID NO: 12880 - DNA, 18 bp, synthetic construct
  misc_feature 1..18: note = Description of Artificial Sequence: Synthetic Antisense oligonucleotide
  modified_base 1: mod_base = OTHER; note = 5-methyl
  modified_base 5..6: mod_base = OTHER; note = 5-methyl
  modified_base 10..12: mod_base = OTHER; note = 5-methyl
  modified_base 5: mod_base = OTHER; note = bicyclic nucleic acid (BNA)
  modified_base 14: mod_base = OTHER; note = bicyclic nucleic acid (BNA)
  modified_base 18: mod_base = OTHER; note = bicyclic nucleic acid (BNA)
  source 1..18: mol_type = other DNA
ctgtccaagcccggttga

SEQ ID NO: 12881 - DNA, 18 bp, synthetic construct
  misc_feature 1..18: note = Description of Artificial Sequence: Synthetic Antisense oligonucleotide
  modified_base 1: mod_base = OTHER; note = 5-methyl
  modified_base 5..6: mod_base = OTHER; note = 5-methyl
  modified_base 10..12: mod_base = OTHER; note = 5-methyl
  modified_base 3: mod_base = OTHER; note = bicyclic nucleic acid (BNA)
  modified_base 14: mod_base = OTHER; note = bicyclic nucleic acid (BNA)
  modified_base 18: mod_base = OTHER; note = bicyclic nucleic acid (BNA)
  source 1..18: mol_type = other DNA
ctgtccaagcccggttga

SEQ ID NO: 12882 - DNA, 18 bp, synthetic construct
  misc_feature 1..18: note = Description of Artificial Sequence: Synthetic Antisense oligonucleotide
  modified_base 1: mod_base = OTHER; note = 5-methyl
  modified_base 5..6: mod_base = OTHER; note = 5-methyl
  modified_base 10..12: mod_base = OTHER; note = 5-methyl
  modified_base 10: mod_base = OTHER; note = bicyclic nucleic acid (BNA)
  modified_base 12: mod_base = OTHER; note = bicyclic nucleic acid (BNA)
  modified_base 18: mod_base = OTHER; note = bicyclic nucleic acid (BNA)
  source 1..18: mol_type = other DNA
ctgtccaagcccggttga

SEQ ID NO: 12883 - DNA, 18 bp, synthetic construct
  misc_feature 1..18: note = Description of Artificial Sequence: Synthetic Antisense oligonucleotide
  modified_base 1: mod_base = OTHER; note = 5-methyl
  modified_base 5..6: mod_base = OTHER; note = 5-methyl
  modified_base 10..12: mod_base = OTHER; note = 5-methyl
  modified_base 12: mod_base = OTHER; note = bicyclic nucleic acid (BNA)
  modified_base 14: mod_base = OTHER; note = bicyclic nucleic acid (BNA)
  modified_base 18: mod_base = OTHER; note = bicyclic nucleic acid (BNA)
  source 1..18: mol_type = other DNA
ctgtccaagcccggttga

SEQ ID NO: 12884 - DNA, 18 bp, synthetic construct
  misc_feature 1..18: note = Description of Artificial Sequence: Synthetic Antisense oligonucleotide
  modified_base 1: mod_base = OTHER; note = 5-methyl
  modified_base 5..6: mod_base = OTHER; note = 5-methyl
  modified_base 10..12: mod_base = OTHER; note = 5-methyl
  modified_base 5: mod_base = OTHER; note = bicyclic nucleic acid (BNA)
  modified_base 11: mod_base = OTHER; note = bicyclic nucleic acid (BNA)
  modified_base 18: mod_base = OTHER; note = bicyclic nucleic acid (BNA)
  source 1..18: mol_type = other DNA
ctgtccaagcccggttga

SEQ ID NO: 12885 - DNA, 18 bp, synthetic construct
  misc_feature 1..18: note = Description of Artificial Sequence: Synthetic Antisense oligonucleotide
  modified_base 1: mod_base = OTHER; note = 5-methyl
  modified_base 5..6: mod_base = OTHER; note = 5-methyl
  modified_base 10..12: mod_base = OTHER; note = 5-methyl
  modified_base 6: mod_base = OTHER; note = bicyclic nucleic acid (BNA)
  modified_base 12: mod_base = OTHER; note = bicyclic nucleic acid (BNA)
  modified_base 18: mod_base = OTHER; note = bicyclic nucleic acid (BNA)
  source 1..18: mol_type = other DNA
ctgtccaagcccggttga

SEQ ID NO: 12886 - DNA, 18 bp, synthetic construct
  misc_feature 1..18: note = Description of Artificial Sequence: Synthetic Antisense oligonucleotide
  modified_base 1: mod_base = OTHER; note = 5-methyl
  modified_base 5..6: mod_base = OTHER; note = 5-methyl
  modified_base 10..12: mod_base = OTHER; note = 5-methyl
  modified_base 5..6: mod_base = OTHER; note = bicyclic nucleic acid (BNA)
  modified_base 18: mod_base = OTHER; note = bicyclic nucleic acid (BNA)
  source 1..18: mol_type = other DNA
ctgtccaagcccggttga

SEQ ID NO: 12887 - DNA, 18 bp, synthetic construct
  misc_feature 1..18: note = Description of Artificial Sequence: Synthetic Antisense oligonucleotide
  modified_base 1: mod_base = OTHER; note = 5-methyl
  modified_base 5..6: mod_base = OTHER; note = 5-methyl
  modified_base 10..12: mod_base = OTHER; note = 5-methyl
  modified_base 11: mod_base = OTHER; note = bicyclic nucleic acid (BNA)
  modified_base 14: mod_base = OTHER; note = bicyclic nucleic acid (BNA)
  modified_base 18: mod_base = OTHER; note = bicyclic nucleic acid (BNA)
  source 1..18: mol_type = other DNA
ctgtccaagcccggttga

SEQ ID NO: 12888 - DNA, 18 bp, synthetic construct
  misc_feature 1..18: note = Description of Artificial Sequence: Synthetic Antisense oligonucleotide
  modified_base 1: mod_base = OTHER; note = 5-methyl
  modified_base 5..6: mod_base = OTHER; note = 5-methyl
  modified_base 10..12: mod_base = OTHER; note = 5-methyl
  modified_base 9: mod_base = OTHER; note = bicyclic nucleic acid (BNA)
  modified_base 12: mod_base = OTHER; note = bicyclic nucleic acid (BNA)
  modified_base 18: mod_base = OTHER; note = bicyclic nucleic acid (BNA)
  source 1..18: mol_type = other DNA
ctgtccaagcccggttga

SEQ ID NO: 12889 - DNA, 18 bp, synthetic construct
  misc_feature 1..18: note = Description of Artificial Sequence: Synthetic Antisense oligonucleotide
  modified_base 1: mod_base = OTHER; note = 5-methyl
  modified_base 5..6: mod_base = OTHER; note = 5-methyl
  modified_base 10..12: mod_base = OTHER; note = 5-methyl
  modified_base 3: mod_base = OTHER; note = bicyclic nucleic acid (BNA)
  modified_base 11: mod_base = OTHER; note = bicyclic nucleic acid (BNA)
  modified_base 18: mod_base = OTHER; note = bicyclic nucleic acid (BNA)
  source 1..18: mol_type = other DNA
ctgtccaagcccggttga

SEQ ID NO: 12890 - DNA, 18 bp, synthetic construct
  misc_feature 1..18: note = Description of Artificial Sequence: Synthetic Antisense oligonucleotide
  modified_base 1: mod_base = OTHER; note = 5-methyl
  modified_base 5..6: mod_base = OTHER; note = 5-methyl
  modified_base 10..12: mod_base = OTHER; note = 5-methyl
  modified_base 10..11: mod_base = OTHER; note = bicyclic nucleic acid (BNA)
  modified_base 18: mod_base = OTHER; note = bicyclic nucleic acid (BNA)
  source 1..18: mol_type = other DNA
ctgtccaagcccggttga

SEQ ID NO: 12891 - DNA, 18 bp, synthetic construct
  misc_feature 1..18: note = Description of Artificial Sequence: Synthetic Antisense oligonucleotide
  modified_base 1: mod_base = OTHER; note = 5-methyl
  modified_base 5..6: mod_base = OTHER; note = 5-methyl
  modified_base 10..12: mod_base = OTHER; note = 5-methyl
  modified_base 12..13: mod_base = OTHER; note = bicyclic nucleic acid (BNA)
  modified_base 18: mod_base = OTHER; note = bicyclic nucleic acid (BNA)
  source 1..18: mol_type = other DNA
ctgtccaagcccggttga

SEQ ID NO: 12892 - DNA, 18 bp, synthetic construct
  misc_feature 1..18: note = Description of Artificial Sequence: Synthetic Antisense oligonucleotide
  modified_base 1: mod_base = OTHER; note = 5-methyl
  modified_base 5..6: mod_base = OTHER; note = 5-methyl
  modified_base 10..12: mod_base = OTHER; note = 5-methyl
  modified_base 5: mod_base = OTHER; note = bicyclic nucleic acid (BNA)
  modified_base 12: mod_base = OTHER; note = bicyclic nucleic acid (BNA)
  modified_base 18: mod_base = OTHER; note = bicyclic nucleic acid (BNA)
  source 1..18: mol_type = other DNA
ctgtccaagcccggttga

SEQ ID NO: 12893 - DNA, 18 bp, synthetic construct
  misc_feature 1..18: note = Description of Artificial Sequence: Synthetic Antisense oligonucleotide
  modified_base 1: mod_base = OTHER; note = 5-methyl
  modified_base 5..6: mod_base = OTHER; note = 5-methyl
  modified_base 10..12: mod_base = OTHER; note = 5-methyl
  modified_base 10: mod_base = OTHER; note = bicyclic nucleic acid (BNA)
  modified_base 14: mod_base = OTHER; note = bicyclic nucleic acid (BNA)
  modified_base 18: mod_base = OTHER; note = bicyclic nucleic acid (BNA)
  source 1..18: mol_type = other DNA
ctgtccaagcccggttga

SEQ ID NO: 12894 - DNA, 18 bp, synthetic construct
  misc_feature 1..18: note = Description of Artificial Sequence: Synthetic Antisense oligonucleotide
  modified_base 1: mod_base = OTHER; note = 5-methyl
  modified_base 5..6: mod_base = OTHER; note = 5-methyl
  modified_base 10..12: mod_base = OTHER; note = 5-methyl
  modified_base 6: mod_base = OTHER; note = bicyclic nucleic acid (BNA)
  modified_base 11: mod_base = OTHER; note = bicyclic nucleic acid (BNA)
  modified_base 18: mod_base = OTHER; note = bicyclic nucleic acid (BNA)
  source 1..18: mol_type = other DNA
ctgtccaagcccggttga

SEQ ID NO: 12895 - DNA, 18 bp, synthetic construct
  misc_feature 1..18: note = Description of Artificial Sequence: Synthetic Antisense oligonucleotide
  modified_base 1: mod_base = OTHER; note = 5-methyl
  modified_base 5..6: mod_base = OTHER; note = 5-methyl
  modified_base 10..12: mod_base = OTHER; note = 5-methyl
  modified_base 9: mod_base = OTHER; note = bicyclic nucleic acid (BNA)
  modified_base 13: mod_base = OTHER; note = bicyclic nucleic acid (BNA)
  modified_base 18: mod_base = OTHER; note = bicyclic nucleic acid (BNA)
  source 1..18: mol_type = other DNA
ctgtccaagcccggttga

SEQ ID NO: 12896 - DNA, 18 bp, synthetic construct
  misc_feature 1..18: note = Description of Artificial Sequence: Synthetic Antisense oligonucleotide
  modified_base 1: mod_base = OTHER; note = 5-methyl
  modified_base 5..6: mod_base = OTHER; note = 5-methyl
  modified_base 10..12: mod_base = OTHER; note = 5-methyl
  modified_base 3: mod_base = OTHER; note = bicyclic nucleic acid (BNA)
  modified_base 12: mod_base = OTHER; note = bicyclic nucleic acid (BNA)
  modified_base 18: mod_base = OTHER; note = bicyclic nucleic acid (BNA)
  source 1..18: mol_type = other DNA
ctgtccaagcccggttga

SEQ ID NO: 12897 - DNA, 18 bp, synthetic construct
  misc_feature 1..18: note = Description of Artificial Sequence: Synthetic Antisense oligonucleotide
  modified_base 1: mod_base = OTHER; note = 5-methyl
  modified_base 5..6: mod_base = OTHER; note = 5-methyl
  modified_base 10..12: mod_base = OTHER; note = 5-methyl
  modified_base 3: mod_base = OTHER; note = bicyclic nucleic acid (BNA)
  modified_base 5: mod_base = OTHER; note = bicyclic nucleic acid (BNA)
  modified_base 18: mod_base = OTHER; note = bicyclic nucleic acid (BNA)
  source 1..18: mol_type = other DNA
ctgtccaagcccggttga

SEQ ID NO: 12898 - DNA, 18 bp, synthetic construct
  misc_feature 1..18: note = Description of Artificial Sequence: Synthetic Antisense oligonucleotide
  modified_base 1: mod_base = OTHER; note = 5-methyl
  modified_base 5..6: mod_base = OTHER; note = 5-methyl
  modified_base 10..12: mod_base = OTHER; note = 5-methyl
  modified_base 10: mod_base = OTHER; note = bicyclic nucleic acid (BNA)
  modified_base 13: mod_base = OTHER; note = bicyclic nucleic acid (BNA)
  modified_base 18: mod_base = OTHER; note = bicyclic nucleic acid (BNA)
  source 1..18: mol_type = other DNA
ctgtccaagcccggttga

SEQ ID NO: 12899 - DNA, 20 bp, synthetic construct
  misc_feature 1..20: note = Description of Artificial Sequence: Synthetic Antisense oligonucleotide
  modified_base 2: mod_base = OTHER; note = 5-methyl
  modified_base 14: mod_base = OTHER; note = 5-methyl
  modified_base 19: mod_base = OTHER; note = 5-methyl
  modified_base 2: mod_base = OTHER; note = bicyclic nucleic acid (BNA)
  modified_base 20: mod_base = OTHER; note = bicyclic nucleic acid (BNA)
  source 1..20: mol_type = other DNA
tcaaggaagatggcatttct

SEQ ID NO: 12900 - DNA, 20 bp, synthetic construct
  misc_feature 1..20: note = Description of Artificial Sequence: Synthetic Antisense oligonucleotide
  modified_base 2: mod_base = OTHER; note = 5-methyl
  modified_base 14: mod_base = OTHER; note = 5-methyl
  modified_base 19: mod_base = OTHER; note = 5-methyl
  modified_base 9: mod_base = OTHER; note = bicyclic nucleic acid (BNA)
  modified_base 20: mod_base = OTHER; note = bicyclic nucleic acid (BNA)
  source 1..20: mol_type = other DNA
tcaaggaagatggcatttct

SEQ ID NO: 12901 - DNA, 20 bp, synthetic construct
  misc_feature 1..20: note = Description of Artificial Sequence: Synthetic Antisense oligonucleotide
  modified_base 2: mod_base = OTHER; note = 5-methyl
  modified_base 14: mod_base = OTHER; note = 5-methyl
  modified_base 19: mod_base = OTHER; note = 5-methyl
  modified_base 5: mod_base = OTHER; note = bicyclic nucleic acid (BNA)
  modified_base 20: mod_base = OTHER; note = bicyclic nucleic acid (BNA)
  source 1..20: mol_type = other DNA
tcaaggaagatggcatttct

SEQ ID NO: 12902 - DNA, 20 bp, synthetic construct
  misc_feature 1..20: note = Description of Artificial Sequence: Synthetic Antisense oligonucleotide
  modified_base 2: mod_base = OTHER; note = 5-methyl
  modified_base 14: mod_base = OTHER; note = 5-methyl
  modified_base 19: mod_base = OTHER; note = 5-methyl
  modified_base 6: mod_base = OTHER; note = bicyclic nucleic acid (BNA)
  modified_base 20: mod_base = OTHER; note = bicyclic nucleic acid (BNA)
  source 1..20: mol_type = other DNA
tcaaggaagatggcatttct

SEQ ID NO: 12903 - DNA, 20 bp, synthetic construct
  misc_feature 1..20: note = Description of Artificial Sequence: Synthetic Antisense oligonucleotide
  modified_base 2: mod_base = OTHER; note = 5-methyl
  modified_base 14: mod_base = OTHER; note = 5-methyl
  modified_base 19: mod_base = OTHER; note = 5-methyl
  modified_base 12: mod_base = OTHER; note = bicyclic nucleic acid (BNA)
  modified_base 20: mod_base = OTHER; note = bicyclic nucleic acid (BNA)
  source 1..20: mol_type = other DNA
tcaaggaagatggcatttct

SEQ ID NO: 12904 - DNA, 20 bp, synthetic construct
  misc_feature 1..20: note = Description of Artificial Sequence: Synthetic Antisense oligonucleotide
  modified_base 2: mod_base = OTHER; note = 5-methyl
  modified_base 14: mod_base = OTHER; note = 5-methyl
  modified_base 19: mod_base = OTHER; note = 5-methyl
  modified_base 13: mod_base = OTHER; note = bicyclic nucleic acid (BNA)
  modified_base 20: mod_base = OTHER; note = bicyclic nucleic acid (BNA)
  source 1..20: mol_type = other DNA
tcaaggaagatggcatttct

SEQ ID NO: 12905 - DNA, 20 bp, synthetic construct
  misc_feature 1..20: note = Description of Artificial Sequence: Synthetic Antisense oligonucleotide
  modified_base 2: mod_base = OTHER; note = 5-methyl
  modified_base 14: mod_base = OTHER; note = 5-methyl
  modified_base 19: mod_base = OTHER; note = 5-methyl
  modified_base 14: mod_base = OTHER; note = bicyclic nucleic acid (BNA)
  modified_base 20: mod_base = OTHER; note = bicyclic nucleic acid (BNA)
  source 1..20: mol_type = other DNA
tcaaggaagatggcatttct

SEQ ID NO: 12906 - DNA, 22 bp, synthetic construct
  misc_feature 1..22: note = Description of Artificial Sequence: Synthetic Antisense oligonucleotide
  modified_base 2: mod_base = OTHER; note = 5-methyl
  modified_base 14: mod_base = OTHER; note = 5-methyl
  modified_base 19: mod_base = OTHER; note = 5-methyl
  modified_base 2: mod_base = OTHER; note = bicyclic nucleic acid (BNA)
  modified_base 22: mod_base = OTHER; note = bicyclic nucleic acid (BNA)
  source 1..22: mol_type = other DNA
tcaaggaagatggcatttctag

SEQ ID NO: 12907 - DNA, 22 bp, synthetic construct
  misc_feature 1..22: note = Description of Artificial Sequence: Synthetic Antisense oligonucleotide
  modified_base 2: mod_base = OTHER; note = 5-methyl
  modified_base 14: mod_base = OTHER; note = 5-methyl
  modified_base 19: mod_base = OTHER; note = 5-methyl
  modified_base 9: mod_base = OTHER; note = bicyclic nucleic acid (BNA)
  modified_base 22: mod_base = OTHER; note = bicyclic nucleic acid (BNA)
  source 1..22: mol_type = other DNA
tcaaggaagatggcatttctag

SEQ ID NO: 12908 - DNA, 22 bp, synthetic construct
  misc_feature 1..22: note = Description of Artificial Sequence: Synthetic Antisense oligonucleotide
  modified_base 2: mod_base = OTHER; note = 5-methyl
  modified_base 14: mod_base = OTHER; note = 5-methyl
  modified_base 19: mod_base = OTHER; note = 5-methyl
  modified_base 5: mod_base = OTHER; note = bicyclic nucleic acid (BNA)
  modified_base 22: mod_base = OTHER; note = bicyclic nucleic acid (BNA)
  source 1..22: mol_type = other DNA
tcaaggaagatggcatttctag

SEQ ID NO: 12909 - DNA, 22 bp, synthetic construct
  misc_feature 1..22: note = Description of Artificial Sequence: Synthetic Antisense oligonucleotide
  modified_base 2: mod_base = OTHER; note = 5-methyl
  modified_base 14: mod_base = OTHER; note = 5-methyl
  modified_base 19: mod_base = OTHER; note = 5-methyl
  modified_base 6: mod_base = OTHER; note = bicyclic nucleic acid (BNA)
  modified_base 22: mod_base = OTHER; note = bicyclic nucleic acid (BNA)
  source 1..22: mol_type = other DNA
tcaaggaagatggcatttctag

SEQ ID NO: 12910 - DNA, 22 bp, synthetic construct
  misc_feature 1..22: note = Description of Artificial Sequence: Synthetic Antisense oligonucleotide
  modified_base 2: mod_base = OTHER; note = 5-methyl
  modified_base 14: mod_base = OTHER; note = 5-methyl
  modified_base 19: mod_base = OTHER; note = 5-methyl
  modified_base 12: mod_base = OTHER; note = bicyclic nucleic acid (BNA)
  modified_base 22: mod_base = OTHER; note = bicyclic nucleic acid (BNA)
  source 1..22: mol_type = other DNA
tcaaggaagatggcatttctag

SEQ ID NO: 12911 - DNA, 22 bp, synthetic construct
  misc_feature 1..22: note = Description of Artificial Sequence: Synthetic Antisense oligonucleotide
  modified_base 2: mod_base = OTHER; note = 5-methyl
  modified_base 14: mod_base = OTHER; note = 5-methyl
  modified_base 19: mod_base = OTHER; note = 5-methyl
  modified_base 13: mod_base = OTHER; note = bicyclic nucleic acid (BNA)
  modified_base 22: mod_base = OTHER; note = bicyclic nucleic acid (BNA)
  source 1..22: mol_type = other DNA
tcaaggaagatggcatttctag

SEQ ID NO: 12912 - DNA, 22 bp, synthetic construct
  misc_feature 1..22: note = Description of Artificial Sequence: Synthetic Antisense oligonucleotide
  modified_base 2: mod_base = OTHER; note = 5-methyl
  modified_base 14: mod_base = OTHER; note = 5-methyl
  modified_base 19: mod_base = OTHER; note = 5-methyl
  modified_base 19: mod_base = OTHER; note = bicyclic nucleic acid (BNA)
  modified_base 22: mod_base = OTHER; note = bicyclic nucleic acid (BNA)
  source 1..22: mol_type = other DNA
tcaaggaagatggcatttctag

SEQ ID NO: 12913 - DNA, 22 bp, synthetic construct
  misc_feature 1..22: note = Description of Artificial Sequence: Synthetic Antisense oligonucleotide
  modified_base 2: mod_base = OTHER; note = 5-methyl
  modified_base 14: mod_base = OTHER; note = 5-methyl
  modified_base 19: mod_base = OTHER; note = 5-methyl
  modified_base 14: mod_base = OTHER; note = bicyclic nucleic acid (BNA)
  modified_base 22: mod_base = OTHER; note = bicyclic nucleic acid (BNA)
  source 1..22: mol_type = other DNA
tcaaggaagatggcatttctag

SEQ ID NO: 12914 - DNA, 20 bp, synthetic construct
  misc_feature 1..20: note = Description of Artificial Sequence: Synthetic Antisense oligonucleotide
  modified_base 2: mod_base = OTHER; note = 5-methyl
  modified_base 14: mod_base = OTHER; note = 5-methyl
  modified_base 19: mod_base = OTHER; note = 5-methyl
  modified_base 9: mod_base = OTHER; note = bicyclic nucleic acid (BNA)
  modified_base 14: mod_base = OTHER; note = bicyclic nucleic acid (BNA)
  modified_base 20: mod_base = OTHER; note = bicyclic nucleic acid (BNA)
  source 1..20: mol_type = other DNA
tcaaggaagatggcatttct

SEQ ID NO: 12915 - DNA, 20 bp, synthetic construct
  misc_feature 1..20: note = Description of Artificial Sequence: Synthetic Antisense oligonucleotide
  modified_base 2: mod_base = OTHER; note = 5-methyl
  modified_base 14: mod_base = OTHER; note = 5-methyl
  modified_base 19: mod_base = OTHER; note = 5-methyl
  modified_base 5: mod_base = OTHER; note = bicyclic nucleic acid (BNA)
  modified_base 9: mod_base = OTHER; note = bicyclic nucleic acid (BNA)
  modified_base 20: mod_base = OTHER; note = bicyclic nucleic acid (BNA)
  source 1..20: mol_type = other DNA
tcaaggaagatggcatttct

SEQ ID NO: 12916 - DNA, 20 bp, synthetic construct
  misc_feature 1..20: note = Description of Artificial Sequence: Synthetic Antisense oligonucleotide
  modified_base 2: mod_base = OTHER; note = 5-methyl
  modified_base 14: mod_base = OTHER; note = 5-methyl
  modified_base 19: mod_base = OTHER; note = 5-methyl
  modified_base 6: mod_base = OTHER; note = bicyclic nucleic acid (BNA)
  modified_base 14: mod_base = OTHER; note = bicyclic nucleic acid (BNA)
  modified_base 20: mod_base = OTHER; note = bicyclic nucleic acid (BNA)
  source 1..20: mol_type = other DNA
tcaaggaagatggcatttct

SEQ ID NO: 12917 - DNA, 20 bp, synthetic construct
  misc_feature 1..20: note = Description of Artificial Sequence: Synthetic Antisense oligonucleotide
  modified_base 2: mod_base = OTHER; note = 5-methyl
  modified_base 14: mod_base = OTHER; note = 5-methyl
  modified_base 19: mod_base = OTHER; note = 5-methyl
  modified_base 5: mod_base = OTHER; note = bicyclic nucleic acid (BNA)
  modified_base 13: mod_base = OTHER; note = bicyclic nucleic acid (BNA)
  modified_base 20: mod_base = OTHER; note = bicyclic nucleic acid (BNA)
  source 1..20: mol_type = other DNA
tcaaggaagatggcatttct

SEQ ID NO: 12918 - DNA, 20 bp, synthetic construct
  misc_feature 1..20: note = Description of Artificial Sequence: Synthetic Antisense oligonucleotide
  modified_base 2: mod_base = OTHER; note = 5-methyl
  modified_base 14: mod_base = OTHER; note = 5-methyl
  modified_base 19: mod_base = OTHER; note = 5-methyl
  modified_base 2: mod_base = OTHER; note = bicyclic nucleic acid (BNA)
  modified_base 12: mod_base = OTHER; note = bicyclic nucleic acid (BNA)
  modified_base 20: mod_base = OTHER; note = bicyclic nucleic acid (BNA)
  source 1..20: mol_type = other DNA
tcaaggaagatggcatttct

SEQ ID NO: 12919 - DNA, 20 bp, synthetic construct
  misc_feature 1..20: note = Description of Artificial Sequence: Synthetic Antisense oligonucleotide
  modified_base 2: mod_base = OTHER; note = 5-methyl
  modified_base 14: mod_base = OTHER; note = 5-methyl
  modified_base 19: mod_base = OTHER; note = 5-methyl
  modified_base 6: mod_base = OTHER; note = bicyclic nucleic acid (BNA)
  modified_base 9: mod_base = OTHER; note = bicyclic nucleic acid (BNA)
  modified_base 20: mod_base = OTHER; note = bicyclic nucleic acid (BNA)
  source 1..20: mol_type = other DNA
tcaaggaagatggcatttct

SEQ ID NO: 12920 - DNA, 20 bp, synthetic construct
  misc_feature 1..20: note = Description of Artificial Sequence: Synthetic Antisense oligonucleotide
  modified_base 2: mod_base = OTHER; note = 5-methyl
  modified_base 14: mod_base = OTHER; note = 5-methyl
  modified_base 19: mod_base = OTHER; note = 5-methyl
  modified_base 13..14: mod_base = OTHER; note = bicyclic nucleic acid (BNA)
  modified_base 20: mod_base = OTHER; note = bicyclic nucleic acid (BNA)
  source 1..20: mol_type = other DNA
tcaaggaagatggcatttct

SEQ ID NO: 12921 - DNA, 20 bp, synthetic construct
  misc_feature 1..20: note = Description of Artificial Sequence: Synthetic Antisense oligonucleotide
  modified_base 2: mod_base = OTHER; note = 5-methyl
  modified_base 14: mod_base = OTHER; note = 5-methyl
  modified_base 19: mod_base = OTHER; note = 5-methyl
  modified_base 6: mod_base = OTHER; note = bicyclic nucleic acid (BNA)
  modified_base 13: mod_base = OTHER; note = bicyclic nucleic acid (BNA)
  modified_base 20: mod_base = OTHER; note = bicyclic nucleic acid (BNA)
  source 1..20: mol_type = other DNA
tcaaggaagatggcatttct

SEQ ID NO: 12922 - DNA, 20 bp, synthetic construct
  misc_feature 1..20: note = Description of Artificial Sequence: Synthetic Antisense oligonucleotide
  modified_base 2: mod_base = OTHER; note = 5-methyl
  modified_base 14: mod_base = OTHER; note = 5-methyl
  modified_base 19: mod_base = OTHER; note = 5-methyl
  modified_base 5: mod_base = OTHER; note = bicyclic nucleic acid (BNA)
  modified_base 14: mod_base = OTHER; note = bicyclic nucleic acid (BNA)
  modified_base 20: mod_base = OTHER; note = bicyclic nucleic acid (BNA)
  source 1..20: mol_type = other DNA
tcaaggaagatggcatttct

SEQ ID NO: 12923 - DNA, 20 bp, synthetic construct
  misc_feature 1..20: note = Description of Artificial Sequence: Synthetic Antisense oligonucleotide
  modified_base 2: mod_base = OTHER; note = 5-methyl
  modified_base 14: mod_base = OTHER; note = 5-methyl
  modified_base 19: mod_base = OTHER; note = 5-methyl
  modified_base 2: mod_base = OTHER; note = bicyclic nucleic acid (BNA)
  modified_base 6: mod_base = OTHER; note = bicyclic nucleic acid (BNA)
  modified_base 20: mod_base = OTHER; note = bicyclic nucleic acid (BNA)
  source 1..20: mol_type = other DNA
tcaaggaagatggcatttct

SEQ ID NO: 12924 - DNA, 20 bp, synthetic construct
  misc_feature 1..20: note = Description of Artificial Sequence: Synthetic Antisense oligonucleotide
  modified_base 2: mod_base = OTHER; note = 5-methyl
  modified_base 14: mod_base = OTHER; note = 5-methyl
  modified_base 19: mod_base = OTHER; note = 5-methyl
  modified_base 12: mod_base = OTHER; note = bicyclic nucleic acid (BNA)
  modified_base 14: mod_base = OTHER; note = bicyclic nucleic acid (BNA)
  modified_base 20: mod_base = OTHER; note = bicyclic nucleic acid (BNA)
  source 1..20: mol_type = other DNA
tcaaggaagatggcatttct

SEQ ID NO: 12925 - DNA, 20 bp, synthetic construct
  misc_feature 1..20: note = Description of Artificial Sequence: Synthetic Antisense oligonucleotide
  modified_base 2: mod_base = OTHER; note = 5-methyl
  modified_base 14: mod_base = OTHER; note = 5-methyl
  modified_base 19: mod_base = OTHER; note = 5-methyl
  modified_base 6: mod_base = OTHER; note = bicyclic nucleic acid (BNA)
  modified_base 12: mod_base = OTHER; note = bicyclic nucleic acid (BNA)
  modified_base 20: mod_base = OTHER; note = bicyclic nucleic acid (BNA)
  source 1..20: mol_type = other DNA
tcaaggaagatggcatttct

SEQ ID NO: 12926 - DNA, 20 bp, synthetic construct
  misc_feature 1..20: note = Description of Artificial Sequence: Synthetic Antisense oligonucleotide
  modified_base 2: mod_base = OTHER; note = 5-methyl
  modified_base 14: mod_base = OTHER; note = 5-methyl
  modified_base 19: mod_base = OTHER; note = 5-methyl
  modified_base 5..6: mod_base = OTHER; note = bicyclic nucleic acid (BNA)
  modified_base 20: mod_base = OTHER; note = bicyclic nucleic acid (BNA)
  source 1..20: mol_type = other DNA
tcaaggaagatggcatttct

SEQ ID NO: 12927 - DNA, 20 bp, synthetic construct
  misc_feature 1..20: note = Description of Artificial Sequence: Synthetic Antisense oligonucleotide
  modified_base 2: mod_base = OTHER; note = 5-methyl
  modified_base 14: mod_base = OTHER; note = 5-methyl
  modified_base 19: mod_base = OTHER; note = 5-methyl
  modified_base 2: mod_base = OTHER; note = bicyclic nucleic acid (BNA)
  modified_base 14: mod_base = OTHER; note = bicyclic nucleic acid (BNA)
  modified_base 20: mod_base = OTHER; note = bicyclic nucleic acid (BNA)
  source 1..20: mol_type = other DNA
tcaaggaagatggcatttct

SEQ ID NO: 12928 - DNA, 20 bp, synthetic construct
  misc_feature 1..20: note = Description of Artificial Sequence: Synthetic Antisense oligonucleotide
  modified_base 2: mod_base = OTHER; note = 5-methyl
  modified_base 14: mod_base = OTHER; note = 5-methyl
  modified_base 19: mod_base = OTHER; note = 5-methyl
  modified_base 9: mod_base = OTHER; note = bicyclic nucleic acid (BNA)
  modified_base 12: mod_base = OTHER; note = bicyclic nucleic acid (BNA)
  modified_base 20: mod_base = OTHER; note = bicyclic nucleic acid (BNA)
  source 1..20: mol_type = other DNA
tcaaggaagatggcatttct

SEQ ID NO: 12929 - DNA, 20 bp, synthetic construct
  misc_feature 1..20: note = Description of Artificial Sequence: Synthetic Antisense oligonucleotide
  modified_base 2: mod_base = OTHER; note = 5-methyl
  modified_base 14: mod_base = OTHER; note = 5-methyl
  modified_base 19: mod_base = OTHER; note = 5-methyl
  modified_base 2: mod_base = OTHER; note = bicyclic nucleic acid (BNA)
  modified_base 5: mod_base = OTHER; note = bicyclic nucleic acid (BNA)
  modified_base 20: mod_base = OTHER; note = bicyclic nucleic acid (BNA)
  source 1..20: mol_type = other DNA
tcaaggaagatggcatttct

SEQ ID NO: 12930 - DNA, 20 bp, synthetic construct
  misc_feature 1..20: note = Description of Artificial Sequence: Synthetic Antisense oligonucleotide
  modified_base 2: mod_base = OTHER; note = 5-methyl
  modified_base 14: mod_base = OTHER; note = 5-methyl
  modified_base 19: mod_base = OTHER; note = 5-methyl
  modified_base 12..13: mod_base = OTHER; note = bicyclic nucleic acid (BNA)
  modified_base 20: mod_base = OTHER; note = bicyclic nucleic acid (BNA)
  source 1..20: mol_type = other DNA
tcaaggaagatggcatttct

SEQ ID NO: 12931 - DNA, 20 bp, synthetic construct
  misc_feature 1..20: note = Description of Artificial Sequence: Synthetic Antisense oligonucleotide
  modified_base 2: mod_base = OTHER; note = 5-methyl
  modified_base 14: mod_base = OTHER; note = 5-methyl
  modified_base 19: mod_base = OTHER; note = 5-methyl
  modified_base 5: mod_base = OTHER; note = bicyclic nucleic acid (BNA)
  modified_base 12: mod_base = OTHER; note = bicyclic nucleic acid (BNA)
  modified_base 20: mod_base = OTHER; note = bicyclic nucleic acid (BNA)
  source 1..20: mol_type = other DNA
tcaaggaagatggcatttct

SEQ ID NO: 12932 - DNA, 20 bp, synthetic construct
  misc_feature 1..20: note = Description of Artificial Sequence: Synthetic Antisense oligonucleotide
  modified_base 2: mod_base = OTHER; note = 5-methyl
  modified_base 14: mod_base = OTHER; note = 5-methyl
  modified_base 19: mod_base = OTHER; note = 5-methyl
  modified_base 2: mod_base = OTHER; note = bicyclic nucleic acid (BNA)
  modified_base 13: mod_base = OTHER; note = bicyclic nucleic acid (BNA)
  modified_base 20: mod_base = OTHER; note = bicyclic nucleic acid (BNA)
  source 1..20: mol_type = other DNA
tcaaggaagatggcatttct

SEQ ID NO: 12933 - DNA, 20 bp, synthetic construct
  misc_feature 1..20: note = Description of Artificial Sequence: Synthetic Antisense oligonucleotide
  modified_base 2: mod_base = OTHER; note = 5-methyl
  modified_base 14: mod_base = OTHER; note = 5-methyl
  modified_base 19: mod_base = OTHER; note = 5-methyl
  modified_base 9: mod_base = OTHER; note = bicyclic nucleic acid (BNA)
  modified_base 13: mod_base = OTHER; note = bicyclic nucleic acid (BNA)
  modified_base 20: mod_base = OTHER; note = bicyclic nucleic acid (BNA)
  source 1..20: mol_type = other DNA
tcaaggaagatggcatttct

SEQ ID NO: 12934 - DNA, 20 bp, synthetic construct
  misc_feature 1..20: note = Description of Artificial Sequence: Synthetic Antisense oligonucleotide
  modified_base 2: mod_base = OTHER; note = 5-methyl
  modified_base 14: mod_base = OTHER; note = 5-methyl
  modified_base 19: mod_base = OTHER; note = 5-methyl
  modified_base 2: mod_base = OTHER; note = bicyclic nucleic acid (BNA)
  modified_base 9: mod_base = OTHER; note = bicyclic nucleic acid (BNA)
  modified_base 20: mod_base = OTHER; note = bicyclic nucleic acid (BNA)
  source 1..20: mol_type = other DNA
tcaaggaagatggcatttct

SEQ ID NO: 12935 - DNA, 22 bp, synthetic construct
  misc_feature 1..22: note = Description of Artificial Sequence: Synthetic Antisense oligonucleotide
  modified_base 2: mod_base = OTHER; note = 5-methyl
  modified_base 14: mod_base = OTHER; note = 5-methyl
  modified_base 19: mod_base = OTHER; note = 5-methyl
  modified_base 9: mod_base = OTHER; note = bicyclic nucleic acid (BNA)
  modified_base 14: mod_base = OTHER; note = bicyclic nucleic acid (BNA)
  modified_base 22: mod_base = OTHER; note = bicyclic nucleic acid (BNA)
  source 1..22: mol_type = other DNA
tcaaggaagatggcatttctag

SEQ ID NO: 12936 - DNA, 22 bp, synthetic construct
  misc_feature 1..22: note = Description of Artificial Sequence: Synthetic Antisense oligonucleotide
  modified_base 2: mod_base = OTHER; note = 5-methyl
  modified_base 14: mod_base = OTHER; note = 5-methyl
  modified_base 19: mod_base = OTHER; note = 5-methyl
  modified_base 5: mod_base = OTHER; note = bicyclic nucleic acid (BNA)
  modified_base 9: mod_base = OTHER; note = bicyclic nucleic acid (BNA)
  modified_base 22: mod_base = OTHER; note = bicyclic nucleic acid (BNA)
  source 1..22: mol_type = other DNA
tcaaggaagatggcatttctag

SEQ ID NO: 12937 - DNA, 22 bp, synthetic construct
  misc_feature 1..22: note = Description of Artificial Sequence: Synthetic Antisense oligonucleotide
  modified_base 2: mod_base = OTHER; note = 5-methyl
  modified_base 14: mod_base = OTHER; note = 5-methyl
  modified_base 19: mod_base = OTHER; note = 5-methyl
  modified_base 5: mod_base = OTHER; note = bicyclic nucleic acid (BNA)
  modified_base 19: mod_base = OTHER; note = bicyclic nucleic acid (BNA)
  modified_base 22: mod_base = OTHER; note = bicyclic nucleic acid (BNA)
  source 1..22: mol_type = other DNA
tcaaggaagatggcatttctag

SEQ ID NO: 12938 - DNA, 22 bp, synthetic construct
  misc_feature 1..22: note = Description of Artificial Sequence: Synthetic Antisense oligonucleotide
  modified_base 2: mod_base = OTHER; note = 5-methyl
  modified_base 14: mod_base = OTHER; note = 5-methyl
  modified_base 19: mod_base = OTHER; note = 5-methyl
  modified_base 6: mod_base = OTHER; note = bicyclic nucleic acid (BNA)
  modified_base 14: mod_base = OTHER; note = bicyclic nucleic acid (BNA)
  modified_base 22: mod_base = OTHER; note = bicyclic nucleic acid (BNA)
  source 1..22: mol_type = other DNA
tcaaggaagatggcatttctag

SEQ ID NO: 12939 - DNA, 22 bp, synthetic construct
  misc_feature 1..22: note = Description of Artificial Sequence: Synthetic Antisense oligonucleotide
  modified_base 2: mod_base = OTHER; note = 5-methyl
  modified_base 14: mod_base = OTHER; note = 5-methyl
  modified_base 19: mod_base = OTHER; note = 5-methyl
  modified_base 5: mod_base = OTHER; note = bicyclic nucleic acid (BNA)
  modified_base 13: mod_base = OTHER; note = bicyclic nucleic acid (BNA)
  modified_base 22: mod_base = OTHER; note = bicyclic nucleic acid (BNA)
  source 1..22: mol_type = other DNA
tcaaggaagatggcatttctag

SEQ ID NO: 12940 - DNA, 22 bp, synthetic construct
  misc_feature 1..22: note = Description of Artificial Sequence: Synthetic Antisense oligonucleotide
  modified_base 2: mod_base = OTHER; note = 5-methyl
  modified_base 14: mod_base = OTHER; note = 5-methyl
  modified_base 19: mod_base = OTHER; note = 5-methyl
  modified_base 2: mod_base = OTHER; note = bicyclic nucleic acid (BNA)
  modified_base 12: mod_base = OTHER; note = bicyclic nucleic acid (BNA)
  modified_base 22: mod_base = OTHER; note = bicyclic nucleic acid (BNA)
  source 1..22: mol_type = other DNA
tcaaggaagatggcatttctag

SEQ ID NO: 12941 - DNA, 22 bp, synthetic construct
  misc_feature 1..22: note = Description of Artificial Sequence: Synthetic Antisense oligonucleotide
  modified_base 2: mod_base = OTHER; note = 5-methyl
  modified_base 14: mod_base = OTHER; note = 5-methyl
  modified_base 19: mod_base = OTHER; note = 5-methyl
  modified_base 6: mod_base = OTHER; note = bicyclic nucleic acid (BNA)
  modified_base 9: mod_base = OTHER; note = bicyclic nucleic acid (BNA)
  modified_base 22: mod_base = OTHER; note = bicyclic nucleic acid (BNA)
  source 1..22: mol_type = other DNA
tcaaggaagatggcatttctag

SEQ ID NO: 12942 - DNA, 22 bp, synthetic construct
  misc_feature 1..22: note = Description of Artificial Sequence: Synthetic Antisense oligonucleotide
  modified_base 2: mod_base = OTHER; note = 5-methyl
  modified_base 14: mod_base = OTHER; note = 5-methyl
  modified_base 19: mod_base = OTHER; note = 5-methyl
  modified_base 13..14: mod_base = OTHER; note = bicyclic nucleic acid (BNA)
  modified_base 22: mod_base = OTHER; note = bicyclic nucleic acid (BNA)
  source 1..22: mol_type = other DNA
tcaaggaagatggcatttctag

SEQ ID NO: 12943 - DNA, 22 bp, synthetic construct
  misc_feature 1..22: note = Description of Artificial Sequence: Synthetic Antisense oligonucleotide
  modified_base 2: mod_base = OTHER; note = 5-methyl
  modified_base 14: mod_base = OTHER; note = 5-methyl
  modified_base 19: mod_base = OTHER; note = 5-methyl
  modified_base 6: mod_base = OTHER; note = bicyclic nucleic acid (BNA)
  modified_base 13: mod_base = OTHER; note = bicyclic nucleic acid (BNA)
  modified_base 22: mod_base = OTHER; note = bicyclic nucleic acid (BNA)
  source 1..22: mol_type = other DNA
tcaaggaagatggcatttctag

SEQ ID NO: 12944 - DNA, 22 bp, synthetic construct
  misc_feature 1..22: note = Description of Artificial Sequence: Synthetic Antisense oligonucleotide
  modified_base 2: mod_base = OTHER; note = 5-methyl
  modified_base 14: mod_base = OTHER; note = 5-methyl
  modified_base 19: mod_base = OTHER; note = 5-methyl
  modified_base 6: mod_base = OTHER; note = bicyclic nucleic acid (BNA)
  modified_base 19: mod_base = OTHER; note = bicyclic nucleic acid (BNA)
  modified_base 22: mod_base = OTHER; note = bicyclic nucleic acid (BNA)
  source 1..22: mol_type = other DNA
tcaaggaagatggcatttctag

SEQ ID NO: 12945 - DNA, 22 bp, synthetic construct
  misc_feature 1..22: note = Description of Artificial Sequence: Synthetic Antisense oligonucleotide
  modified_base 2: mod_base = OTHER; note = 5-methyl
  modified_base 14: mod_base = OTHER; note = 5-methyl
  modified_base 19: mod_base = OTHER; note = 5-methyl
  modified_base 5: mod_base = OTHER; note = bicyclic nucleic acid (BNA)
  modified_base 14: mod_base = OTHER; note = bicyclic nucleic acid (BNA)
  modified_base 22: mod_base = OTHER; note = bicyclic nucleic acid (BNA)
  source 1..22: mol_type = other DNA
tcaaggaagatggcatttctag

SEQ ID NO: 12946 - DNA, 22 bp, synthetic construct
  misc_feature 1..22: note = Description of Artificial Sequence: Synthetic Antisense oligonucleotide
  modified_base 2: mod_base = OTHER; note = 5-methyl
  modified_base 14: mod_base = OTHER; note = 5-methyl
  modified_base 19: mod_base = OTHER; note = 5-methyl
  modified_base 2: mod_base = OTHER; note = bicyclic nucleic acid (BNA)
  modified_base 6: mod_base = OTHER; note = bicyclic nucleic acid (BNA)
  modified_base 22: mod_base = OTHER; note = bicyclic nucleic acid (BNA)
  source 1..22: mol_type = other DNA
tcaaggaagatggcatttctag

SEQ ID NO: 12947 - DNA, 22 bp, synthetic construct
  misc_feature 1..22: note = Description of Artificial Sequence: Synthetic Antisense oligonucleotide
  modified_base 2: mod_base = OTHER; note = 5-methyl
  modified_base 14: mod_base = OTHER; note = 5-methyl
  modified_base 19: mod_base = OTHER; note = 5-methyl
  modified_base 12: mod_base = OTHER; note = bicyclic nucleic acid (BNA)
  modified_base 19: mod_base = OTHER; note = bicyclic nucleic acid (BNA)
  modified_base 22: mod_base = OTHER; note = bicyclic nucleic acid (BNA)
  source 1..22: mol_type = other DNA
tcaaggaagatggcatttctag

SEQ ID NO: 12948 - DNA, 22 bp, synthetic construct
  misc_feature 1..22: note = Description of Artificial Sequence: Synthetic Antisense oligonucleotide
  modified_base 2: mod_base = OTHER; note = 5-methyl
  modified_base 14: mod_base = OTHER; note = 5-methyl
  modified_base 19: mod_base = OTHER; note = 5-methyl
  modified_base 12: mod_base = OTHER; note = bicyclic nucleic acid (BNA)
  modified_base 14: mod_base = OTHER; note = bicyclic nucleic acid (BNA)
  modified_base 22: mod_base = OTHER; note = bicyclic nucleic acid (BNA)
  source 1..22: mol_type = other DNA
tcaaggaagatggcatttctag

SEQ ID NO: 12949 - DNA, 22 bp, synthetic construct
  misc_feature 1..22: note = Description of Artificial Sequence: Synthetic Antisense oligonucleotide
  modified_base 2: mod_base = OTHER; note = 5-methyl
  modified_base 14: mod_base = OTHER; note = 5-methyl
  modified_base 19: mod_base = OTHER; note = 5-methyl
  modified_base 6: mod_base = OTHER; note = bicyclic nucleic acid (BNA)
  modified_base 12: mod_base = OTHER; note = bicyclic nucleic acid (BNA)
  modified_base 22: mod_base = OTHER; note = bicyclic nucleic acid (BNA)
  source 1..22: mol_type = other DNA
tcaaggaagatggcatttctag

SEQ ID NO: 12950 - DNA, 22 bp, synthetic construct
  misc_feature 1..22: note = Description of Artificial Sequence: Synthetic Antisense oligonucleotide
  modified_base 2: mod_base = OTHER; note = 5-methyl
  modified_base 14: mod_base = OTHER; note = 5-methyl
  modified_base 19: mod_base = OTHER; note = 5-methyl
  modified_base 5..6: mod_base = OTHER; note = bicyclic nucleic acid (BNA)
  modified_base 22: mod_base = OTHER; note = bicyclic nucleic acid (BNA)
  source 1..22: mol_type = other DNA
tcaaggaagatggcatttctag

SEQ ID NO: 12951 - DNA, 22 bp, synthetic construct
  misc_feature 1..22: note = Description of Artificial Sequence: Synthetic Antisense oligonucleotide
  modified_base 2: mod_base = OTHER; note = 5-methyl
  modified_base 14: mod_base = OTHER; note = 5-methyl
  modified_base 19: mod_base = OTHER; note = 5-methyl
  modified_base 2: mod_base = OTHER; note = bicyclic nucleic acid (BNA)
  modified_base 14: mod_base = OTHER; note = bicyclic nucleic acid (BNA)
  modified_base 22: mod_base = OTHER; note = bicyclic nucleic acid (BNA)
  source 1..22: mol_type = other DNA
tcaaggaagatggcatttctag

SEQ ID NO: 12952 - DNA, 22 bp, synthetic construct
  misc_feature 1..22: note = Description of Artificial Sequence: Synthetic Antisense oligonucleotide
  modified_base 2: mod_base = OTHER; note = 5-methyl
  modified_base 14: mod_base = OTHER; note = 5-methyl
  modified_base 19: mod_base = OTHER; note = 5-methyl
  modified_base 9: mod_base = OTHER; note = bicyclic nucleic acid (BNA)
  modified_base 12: mod_base = OTHER; note = bicyclic nucleic acid (BNA)
  modified_base 22: mod_base = OTHER; note = bicyclic nucleic acid (BNA)
  source 1..22: mol_type = other DNA
tcaaggaagatggcatttctag

SEQ ID NO: 12953 - DNA, 22 bp, synthetic construct
  misc_feature 1..22: note = Description of Artificial Sequence: Synthetic Antisense oligonucleotide
  modified_base 2: mod_base = OTHER; note = 5-methyl
  modified_base 14: mod_base = OTHER; note = 5-methyl
  modified_base 19: mod_base = OTHER; note = 5-methyl
  modified_base 2: mod_base = OTHER; note = bicyclic nucleic acid (BNA)
  modified_base 5: mod_base = OTHER; note = bicyclic nucleic acid (BNA)
  modified_base 22: mod_base = OTHER; note = bicyclic nucleic acid (BNA)
  source 1..22: mol_type = other DNA
tcaaggaagatggcatttctag

SEQ ID NO: 12954 - DNA, 22 bp, synthetic construct
  misc_feature 1..22: note = Description of Artificial Sequence: Synthetic Antisense oligonucleotide
  modified_base 2: mod_base = OTHER; note = 5-methyl
  modified_base 14: mod_base = OTHER; note = 5-methyl
  modified_base 19: mod_base = OTHER; note = 5-methyl
  modified_base 13: mod_base = OTHER; note = bicyclic nucleic acid (BNA)
  modified_base 19: mod_base = OTHER; note = bicyclic nucleic acid (BNA)
  modified_base 22: mod_base = OTHER; note = bicyclic nucleic acid (BNA)
  source 1..22: mol_type = other DNA
tcaaggaagatggcatttctag

SEQ ID NO: 12955 - DNA, 22 bp, synthetic construct
  misc_feature 1..22: note = Description of Artificial Sequence: Synthetic Antisense oligonucleotide
  modified_base 2: mod_base = OTHER; note = 5-methyl
  modified_base 14: mod_base = OTHER; note = 5-methyl
  modified_base 19: mod_base = OTHER; note = 5-methyl
  modified_base 12..13: mod_base = OTHER; note = bicyclic nucleic acid (BNA)
  modified_base 22: mod_base = OTHER; note = bicyclic nucleic acid (BNA)
  source 1..22: mol_type = other DNA
tcaaggaagatggcatttctag

SEQ ID NO: 12956 - DNA, 22 bp, synthetic construct
  misc_feature 1..22: note = Description of Artificial Sequence: Synthetic Antisense oligonucleotide
  modified_base 2: mod_base = OTHER; note = 5-methyl
  modified_base 14: mod_base = OTHER; note = 5-methyl
  modified_base 19: mod_base = OTHER; note = 5-methyl
  modified_base 5: mod_base = OTHER; note = bicyclic nucleic acid (BNA)
  modified_base 12: mod_base = OTHER; note = bicyclic nucleic acid (BNA)
  modified_base 22: mod_base = OTHER; note = bicyclic nucleic acid (BNA)
  source 1..22: mol_type = other DNA
tcaaggaagatggcatttctag

SEQ ID NO: 12957 - DNA, 22 bp, synthetic construct
  misc_feature 1..22: note = Description of Artificial Sequence: Synthetic Antisense oligonucleotide
  modified_base 2: mod_base = OTHER; note = 5-methyl
  modified_base 14: mod_base = OTHER; note = 5-methyl
  modified_base 19: mod_base = OTHER; note = 5-methyl
  modified_base 2: mod_base = OTHER; note = bicyclic nucleic acid (BNA)
  modified_base 13: mod_base = OTHER; note = bicyclic nucleic acid (BNA)
  modified_base 22: mod_base = OTHER; note = bicyclic nucleic acid (BNA)
  source 1..22: mol_type = other DNA
tcaaggaagatggcatttctag

SEQ ID NO: 12958 - DNA, 22 bp, synthetic construct
  misc_feature 1..22: note = Description of Artificial Sequence: Synthetic Antisense oligonucleotide
  modified_base 2: mod_base = OTHER; note = 5-methyl
  modified_base 14: mod_base = OTHER; note = 5-methyl
  modified_base 19: mod_base = OTHER; note = 5-methyl
  modified_base 9: mod_base = OTHER; note = bicyclic nucleic acid (BNA)
  modified_base 13: mod_base = OTHER; note = bicyclic nucleic acid (BNA)
  modified_base 22: mod_base = OTHER; note = bicyclic nucleic acid (BNA)
  source 1..22: mol_type = other DNA
tcaaggaagatggcatttctag

SEQ ID NO: 12959 - DNA, 22 bp, synthetic construct
  misc_feature 1..22: note = Description of Artificial Sequence: Synthetic Antisense oligonucleotide
  modified_base 2: mod_base = OTHER; note = 5-methyl
  modified_base 14: mod_base = OTHER; note = 5-methyl
  modified_base 19: mod_base = OTHER; note = 5-methyl
  modified_base 2: mod_base = OTHER; note = bicyclic nucleic acid (BNA)
  modified_base 19: mod_base = OTHER; note = bicyclic nucleic acid (BNA)
  modified_base 22: mod_base = OTHER; note = bicyclic nucleic acid (BNA)
  source 1..22: mol_type = other DNA
tcaaggaagatggcatttctag

SEQ ID NO: 12960 - DNA, 22 bp, synthetic construct
  misc_feature 1..22: note = Description of Artificial Sequence: Synthetic Antisense oligonucleotide
  modified_base 2: mod_base = OTHER; note = 5-methyl
  modified_base 14: mod_base = OTHER; note = 5-methyl
  modified_base 19: mod_base = OTHER; note = 5-methyl
  modified_base 2: mod_base = OTHER; note = bicyclic nucleic acid (BNA)
  modified_base 9: mod_base = OTHER; note = bicyclic nucleic acid (BNA)
  modified_base 22: mod_base = OTHER; note = bicyclic nucleic acid (BNA)
  source 1..22: mol_type = other DNA
tcaaggaagatggcatttctag

SEQ ID NO: 12961 - DNA, 22 bp, synthetic construct
  misc_feature 1..22: note = Description of Artificial Sequence: Synthetic Antisense oligonucleotide
  modified_base 2: mod_base = OTHER; note = 5-methyl
  modified_base 14: mod_base = OTHER; note = 5-methyl
  modified_base 19: mod_base = OTHER; note = 5-methyl
  modified_base 14: mod_base = OTHER; note = bicyclic nucleic acid (BNA)
  modified_base 19: mod_base = OTHER; note = bicyclic nucleic acid (BNA)
  modified_base 22: mod_base = OTHER; note = bicyclic nucleic acid (BNA)
  source 1..22: mol_type = other DNA
tcaaggaagatggcatttctag

SEQ ID NO: 12962 - DNA, 22 bp, synthetic construct
  misc_feature 1..22: note = Description of Artificial Sequence: Synthetic Antisense oligonucleotide
  modified_base 2: mod_base = OTHER; note = 5-methyl
  modified_base 14: mod_base = OTHER; note = 5-methyl
  modified_base 19: mod_base = OTHER; note = 5-methyl
  modified_base 9: mod_base = OTHER; note = bicyclic nucleic acid (BNA)
  modified_base 19: mod_base = OTHER; note = bicyclic nucleic acid (BNA)
  modified_base 22: mod_base = OTHER; note = bicyclic nucleic acid (BNA)
  source 1..22: mol_type = other DNA
tcaaggaagatggcatttctag

SEQ ID NO: 12963 - RNA, 18 nt, synthetic construct
  misc_feature 1..18: note = Description of Artificial Sequence: Synthetic Antisense oligonucleotide
  modified_base 1..2: mod_base = OTHER; note = bicyclic nucleic acid (BNA)
  modified_base 18: mod_base = OTHER; note = bicyclic nucleic acid (BNA)
  source 1..18: mol_type = other RNA
ggtaagttctgtccaagc

SEQ ID NO: 12964 - RNA, 18 nt, synthetic construct
  misc_feature 1..18: note = Description of Artificial Sequence: Synthetic Antisense oligonucleotide
  modified_base 1: mod_base = OTHER; note = bicyclic nucleic acid (BNA)
  modified_base 9: mod_base = OTHER; note = bicyclic nucleic acid (BNA)
  modified_base 18: mod_base = OTHER; note = bicyclic nucleic acid (BNA)
  source 1..18: mol_type = other RNA
ggtaagttctgtccaagc

SEQ ID NO: 12965 - RNA, 18 nt, synthetic construct
  misc_feature 1..18: note = Description of Artificial Sequence: Synthetic Antisense oligonucleotide
  modified_base 1: mod_base = OTHER; note = bicyclic nucleic acid (BNA)
  modified_base 11: mod_base = OTHER; note = bicyclic nucleic acid (BNA)
  modified_base 18: mod_base = OTHER; note = bicyclic nucleic acid (BNA)
  source 1..18: mol_type = other RNA
ggtaagttctgtccaagc

SEQ ID NO: 12966 - RNA, 18 nt, synthetic construct
  misc_feature 1..18: note = Description of Artificial Sequence: Synthetic Antisense oligonucleotide
  modified_base 1: mod_base = OTHER; note = bicyclic nucleic acid (BNA)
  modified_base 6: mod_base = OTHER; note = bicyclic nucleic acid (BNA)
  modified_base 18: mod_base = OTHER; note = bicyclic nucleic acid (BNA)
  source 1..18: mol_type = other RNA
ggtaagttctgtccaagc

SEQ ID NO: 12967 - RNA, 18 nt, synthetic construct
  misc_feature 1..18: note = Description of Artificial Sequence: Synthetic Antisense oligonucleotide
  modified_base 1: mod_base = OTHER; note = bicyclic nucleic acid (BNA)
  modified_base 17..18: mod_base = OTHER; note = bicyclic nucleic acid (BNA)
  source 1..18: mol_type = other RNA
ggtaagttctgtccaagc

SEQ ID NO: 12968 - RNA, 18 nt, synthetic construct
  misc_feature 1..18: note = Description of Artificial Sequence: Synthetic Antisense oligonucleotide
  modified_base 1: mod_base = OTHER; note = bicyclic nucleic acid (BNA)
  modified_base 13: mod_base = OTHER; note = bicyclic nucleic acid (BNA)
  modified_base 18: mod_base = OTHER; note = bicyclic nucleic acid (BNA)
  source 1..18: mol_type = other RNA
ggtaagttctgtccaagc

SEQ ID NO: 12969 - RNA, 18 nt, synthetic construct
  misc_feature 1..18: note = Description of Artificial Sequence: Synthetic Antisense oligonucleotide
  modified_base 1: mod_base = OTHER; note = bicyclic nucleic acid (BNA)
  modified_base 14: mod_base = OTHER; note = bicyclic nucleic acid (BNA)
  modified_base 18: mod_base = OTHER; note = bicyclic nucleic acid (BNA)
  source 1..18: mol_type = other RNA
ggtaagttctgtccaagc

SEQ ID NO: 12970 - RNA, 18 nt, synthetic construct
  misc_feature 1..18: note = Description of Artificial Sequence: Synthetic Antisense oligonucleotide
  modified_base 1: mod_base = OTHER; note = bicyclic nucleic acid (BNA)
  modified_base 16: mod_base = OTHER; note = bicyclic nucleic acid (BNA)
  modified_base 18: mod_base = OTHER; note = bicyclic nucleic acid (BNA)
  source 1..18: mol_type = other RNA
gtaagttctgtccaagcc

SEQ ID NO: 12971 - RNA, 18 nt, synthetic construct
  misc_feature 1..18: note = Description of Artificial Sequence: Synthetic Antisense oligonucleotide
  modified_base 1: mod_base = OTHER; note = bicyclic nucleic acid (BNA)
  modified_base 10: mod_base = OTHER; note = bicyclic nucleic acid (BNA)
  modified_base 18: mod_base = OTHER; note = bicyclic nucleic acid (BNA)
  source 1..18: mol_type = other RNA
gtaagttctgtccaagcc

SEQ ID NO: 12972 - RNA, 18 nt, synthetic construct
  misc_feature 1..18: note = Description of Artificial Sequence: Synthetic Antisense oligonucleotide
  modified_base 1: mod_base = OTHER; note = bicyclic nucleic acid (BNA)
  modified_base 5: mod_base = OTHER; note = bicyclic nucleic acid (BNA)
  modified_base 18: mod_base = OTHER; note = bicyclic nucleic acid (BNA)
  source 1..18: mol_type = other RNA
gtaagttctgtccaagcc

SEQ ID NO: 12973 - RNA, 18 nt, synthetic construct
  misc_feature 1..18: note = Description of Artificial Sequence: Synthetic Antisense oligonucleotide
  modified_base 1: mod_base = OTHER; note = bicyclic nucleic acid (BNA)
  modified_base 17..18: mod_base = OTHER; note = bicyclic nucleic acid (BNA)
  source 1..18: mol_type = other RNA
gtaagttctgtccaagcc

SEQ ID NO: 12974 - RNA, 18 nt, synthetic construct
  misc_feature 1..18: note = Description of Artificial Sequence: Synthetic Antisense oligonucleotide
  modified_base 1: mod_base = OTHER; note = bicyclic nucleic acid (BNA)
  modified_base 12: mod_base = OTHER; note = bicyclic nucleic acid (BNA)
  modified_base 18: mod_base = OTHER; note = bicyclic nucleic acid (BNA)
  source 1..18: mol_type = other RNA
gtaagttctgtccaagcc

SEQ ID NO: 12975 - RNA, 18 nt, synthetic construct
  misc_feature 1..18: note = Description of Artificial Sequence: Synthetic Antisense oligonucleotide
  modified_base 1: mod_base = OTHER; note = bicyclic nucleic acid (BNA)
  modified_base 13: mod_base = OTHER; note = bicyclic nucleic acid (BNA)
  modified_base 18: mod_base = OTHER; note = bicyclic nucleic acid (BNA)
  source 1..18: mol_type = other RNA
gtaagttctgtccaagcc

SEQ ID NO: 12976 - RNA, 18 nt, synthetic construct
  misc_feature 1..18: note = Description of Artificial Sequence: Synthetic Antisense oligonucleotide
  modified_base 1: mod_base = OTHER; note = bicyclic nucleic acid (BNA)
  modified_base 8: mod_base = OTHER; note = bicyclic nucleic acid (BNA)
  modified_base 18: mod_base = OTHER; note = bicyclic nucleic acid (BNA)
  source 1..18: mol_type = other RNA
gtaagttctgtccaagcc

SEQ ID NO: 12977 - RNA, 18 nt, synthetic construct
  misc_feature 1..18: note = Description of Artificial Sequence: Synthetic Antisense oligonucleotide
  modified_base 1..2: mod_base = OTHER; note = bicyclic nucleic acid (BNA)
  modified_base 18: mod_base = OTHER; note = bicyclic nucleic acid (BNA)
  source 1..18: mol_type = other RNA
agtcggtaagttctgtcc

SEQ ID NO: 12978 - RNA, 18 nt, synthetic construct
  misc_feature 1..18: note = Description of Artificial Sequence: Synthetic Antisense oligonucleotide
  modified_base 1: mod_base = OTHER; note = bicyclic nucleic acid (BNA)
  modified_base 4: mod_base = OTHER; note = bicyclic nucleic acid (BNA)
  modified_base 18: mod_base = OTHER; note = bicyclic nucleic acid (BNA)
  source 1..18: mol_type = other RNA
agtcggtaagttctgtcc

SEQ ID NO: 12979 - RNA, 18 nt, synthetic construct
  misc_feature 1..18: note = Description of Artificial Sequence: Synthetic Antisense oligonucleotide
  modified_base 1: mod_base = OTHER; note = bicyclic nucleic acid (BNA)
  modified_base 10: mod_base = OTHER; note = bicyclic nucleic acid (BNA)
  modified_base 18: mod_base = OTHER; note = bicyclic nucleic acid (BNA)
  source 1..18: mol_type = other RNA
agtcggtaagttctgtcc

SEQ ID NO: 12980 - RNA, 18 nt, synthetic construct
  misc_feature 1..18: note = Description of Artificial Sequence: Synthetic Antisense oligonucleotide
  modified_base 1: mod_base = OTHER; note = bicyclic nucleic acid (BNA)
  modified_base 5: mod_base = OTHER; note = bicyclic nucleic acid (BNA)
  modified_base 18: mod_base = OTHER; note = bicyclic nucleic acid (BNA)
  source 1..18: mol_type = other RNA
agtcggtaagttctgtcc

SEQ ID NO: 12981 - RNA, 18 nt, synthetic construct
  misc_feature 1..18: note = Description of Artificial Sequence: Synthetic Antisense oligonucleotide
  modified_base 1: mod_base = OTHER; note = bicyclic nucleic acid (BNA)
  modified_base 6: mod_base = OTHER; note = bicyclic nucleic acid (BNA)
  modified_base 18: mod_base = OTHER; note = bicyclic nucleic acid (BNA)
  source 1..18: mol_type = other RNA
agtcggtaagttctgtcc

SEQ ID NO: 12982 - RNA, 18 nt, synthetic construct
  misc_feature 1..18: note = Description of Artificial Sequence: Synthetic Antisense oligonucleotide
  modified_base 1: mod_base = OTHER; note = bicyclic nucleic acid (BNA)
  modified_base 17..18: mod_base = OTHER; note = bicyclic nucleic acid (BNA)
  source 1..18: mol_type = other RNA
agtcggtaagttctgtcc

SEQ ID NO: 12983 - RNA, 18 nt, synthetic construct
  misc_feature 1..18: note = Description of Artificial Sequence: Synthetic Antisense oligonucleotide
  modified_base 1: mod_base = OTHER; note = bicyclic nucleic acid (BNA)
  modified_base 13: mod_base = OTHER; note = bicyclic nucleic acid (BNA)
  modified_base 18: mod_base = OTHER; note = bicyclic nucleic acid (BNA)
  source 1..18: mol_type = other RNA
agtcggtaagttctgtcc

SEQ ID NO: 12984 - RNA, 18 nt, synthetic construct
  misc_feature 1..18: note = Description of Artificial Sequence: Synthetic Antisense oligonucleotide
  modified_base 1: mod_base = OTHER; note = bicyclic nucleic acid (BNA)
  modified_base 15: mod_base = OTHER; note = bicyclic nucleic acid (BNA)
  modified_base 18: mod_base = OTHER; note = bicyclic nucleic acid (BNA)
  source 1..18: mol_type = other RNA
agtcggtaagttctgtcc

SEQ ID NO: 12985 - RNA, 18 nt, synthetic construct
  misc_feature 1..18: note = Description of Artificial Sequence: Synthetic Antisense oligonucleotide
  modified_base 1: mod_base = OTHER; note = bicyclic nucleic acid (BNA)
  modified_base 3: mod_base = OTHER; note = bicyclic nucleic acid (BNA)
  modified_base 18: mod_base = OTHER; note = bicyclic nucleic acid (BNA)
  source 1..18: mol_type = other RNA
ctgtccaagcccggttga

SEQ ID NO: 12986 - RNA, 18 nt, synthetic construct
  misc_feature 1..18: note = Description of Artificial Sequence: Synthetic Antisense oligonucleotide
  modified_base 1: mod_base = OTHER; note = bicyclic nucleic acid (BNA)
  modified_base 9: mod_base = OTHER; note = bicyclic nucleic acid (BNA)
  modified_base 18: mod_base = OTHER; note = bicyclic nucleic acid (BNA)
  source 1..18: mol_type = other RNA
ctgtccaagcccggttga

SEQ ID NO: 12987 - RNA, 18 nt, synthetic construct
  misc_feature 1..18: note = Description of Artificial Sequence: Synthetic Antisense oligonucleotide
  modified_base 1: mod_base = OTHER; note = bicyclic nucleic acid (BNA)
  modified_base 10: mod_base = OTHER; note = bicyclic nucleic acid (BNA)
  modified_base 18: mod_base = OTHER; note = bicyclic nucleic acid (BNA)
  source 1..18: mol_type = other RNA
ctgtccaagcccggttga

SEQ ID NO: 12988 - RNA, 18 nt, synthetic construct
  misc_feature 1..18: note = Description of Artificial Sequence: Synthetic Antisense oligonucleotide
  modified_base 1: mod_base = OTHER; note = bicyclic nucleic acid (BNA)
  modified_base 5: mod_base = OTHER; note = bicyclic nucleic acid (BNA)
  modified_base 18: mod_base = OTHER; note = bicyclic nucleic acid (BNA)
  source 1..18: mol_type = other RNA
ctgtccaagcccggttga

SEQ ID NO: 12989 - RNA, 18 nt, synthetic construct
  misc_feature 1..18: note = Description of Artificial Sequence: Synthetic Antisense oligonucleotide
  modified_base 1: mod_base = OTHER; note = bicyclic nucleic acid (BNA)
  modified_base 11: mod_base = OTHER; note = bicyclic nucleic acid (BNA)
  modified_base 18: mod_base = OTHER; note = bicyclic nucleic acid (BNA)
  source 1..18: mol_type = other RNA
ctgtccaagcccggttga

SEQ ID NO: 12990 - RNA, 18 nt, synthetic construct
  misc_feature 1..18: note = Description of Artificial Sequence: Synthetic Antisense oligonucleotide
  modified_base 1: mod_base = OTHER; note = bicyclic nucleic acid (BNA)
  modified_base 6: mod_base = OTHER; note = bicyclic nucleic acid (BNA)
  modified_base 18: mod_base = OTHER; note = bicyclic nucleic acid (BNA)
  source 1..18: mol_type = other RNA
ctgtccaagcccggttga

SEQ ID NO: 12991 - RNA, 18 nt, synthetic construct
  misc_feature 1..18: note = Description of Artificial Sequence: Synthetic Antisense oligonucleotide
  modified_base 1: mod_base = OTHER; note = bicyclic nucleic acid (BNA)
  modified_base 17..18: mod_base = OTHER; note = bicyclic nucleic acid (BNA)
  source 1..18: mol_type = other RNA
ctgtccaagcccggttga

SEQ ID NO: 12992 - RNA, 18 nt, synthetic construct
  misc_feature 1..18: note = Description of Artificial Sequence: Synthetic Antisense oligonucleotide
  modified_base 1: mod_base = OTHER; note = bicyclic nucleic acid (BNA)
  modified_base 12: mod_base = OTHER; note = bicyclic nucleic acid (BNA)
  modified_base 18: mod_base = OTHER; note = bicyclic nucleic acid (BNA)
  source 1..18: mol_type = other RNA
ctgtccaagcccggttga

SEQ ID NO: 12993 - RNA, 18 nt, synthetic construct
  misc_feature 1..18: note = Description of Artificial Sequence: Synthetic Antisense oligonucleotide
  modified_base 1: mod_base = OTHER; note = bicyclic nucleic acid (BNA)
  modified_base 13: mod_base = OTHER; note = bicyclic nucleic acid (BNA)
  modified_base 18: mod_base = OTHER; note = bicyclic nucleic acid (BNA)
  source 1..18: mol_type = other RNA
ctgtccaagcccggttga

SEQ ID NO: 12994 - RNA, 18 nt, synthetic construct
  misc_feature 1..18: note = Description of Artificial Sequence: Synthetic Antisense oligonucleotide
  modified_base 1: mod_base = OTHER; note = bicyclic nucleic acid (BNA)
  modified_base 14: mod_base = OTHER; note = bicyclic nucleic acid (BNA)
  modified_base 18: mod_base = OTHER; note = bicyclic nucleic acid (BNA)
  source 1..18: mol_type = other RNA
ctgtccaagcccggttga

SEQ ID NO: 12995 - RNA, 18 nt, synthetic construct
  misc_feature 1..18: note = Description of Artificial Sequence: Synthetic Antisense oligonucleotide
  modified_base 1: mod_base = OTHER; note = bicyclic nucleic acid (BNA)
  modified_base 9: mod_base = OTHER; note = bicyclic nucleic acid (BNA)
  modified_base 14: mod_base = OTHER; note = bicyclic nucleic acid (BNA)
  modified_base 18: mod_base = OTHER; note = bicyclic nucleic acid (BNA)
  source 1..18: mol_type = other RNA
ggtaagttctgtccaagc

SEQ ID NO: 12996 - RNA, 18 nt, synthetic construct
  misc_feature 1..18: note = Description of Artificial Sequence: Synthetic Antisense oligonucleotide
  modified_base 1: mod_base = OTHER; note = bicyclic nucleic acid (BNA)
  modified_base 6: mod_base = OTHER; note = bicyclic nucleic acid (BNA)
  modified_base 14: mod_base = OTHER; note = bicyclic nucleic acid (BNA)
  modified_base 18: mod_base = OTHER; note = bicyclic nucleic acid (BNA)
  source 1..18: mol_type = other RNA
ggtaagttctgtccaagc

SEQ ID NO: 12997 - RNA, 18 nt, synthetic construct
  misc_feature 1..18: note = Description of Artificial Sequence: Synthetic Antisense oligonucleotide
  modified_base 1: mod_base = OTHER; note = bicyclic nucleic acid (BNA)
  modified_base 13: mod_base = OTHER; note = bicyclic nucleic acid (BNA)
  modified_base 17..18: mod_base = OTHER; note = bicyclic nucleic acid (BNA)
  source 1..18: mol_type = other RNA
ggtaagttctgtccaagc

SEQ ID NO: 12998 - RNA, 18 nt, synthetic construct
  misc_feature 1..18: note = Description of Artificial Sequence: Synthetic Antisense oligonucleotide
  modified_base 1: mod_base = OTHER; note = bicyclic nucleic acid (BNA)
  modified_base 6: mod_base = OTHER; note = bicyclic nucleic acid (BNA)
  modified_base 9: mod_base = OTHER; note = bicyclic nucleic acid (BNA)
  modified_base 18: mod_base = OTHER; note = bicyclic nucleic acid (BNA)
  source 1..18: mol_type = other RNA
ggtaagttctgtccaagc

SEQ ID NO: 12999 - RNA, 18 nt, synthetic construct
  misc_feature 1..18: note = Description of Artificial Sequence: Synthetic Antisense oligonucleotide
  modified_base 1: mod_base = OTHER; note = bicyclic nucleic acid (BNA)
  modified_base 13..14: mod_base = OTHER; note = bicyclic nucleic acid (BNA)
  modified_base 18: mod_base = OTHER; note = bicyclic nucleic acid (BNA)
  source 1..18: mol_type = other RNA
ggtaagttctgtccaagc

SEQ ID NO: 13000 - RNA, 18 nt, synthetic construct
  misc_feature 1..18: note = Description of Artificial Sequence: Synthetic Antisense oligonucleotide
  modified_base 1..2: mod_base = OTHER; note = bicyclic nucleic acid (BNA)
  modified_base 17..18: mod_base = OTHER; note = bicyclic nucleic acid (BNA)
  source 1..18: mol_type = other RNA
ggtaagttctgtccaagc

SEQ ID NO: 13001 - RNA, 18 nt, synthetic construct
  misc_feature 1..18: note = Description of Artificial Sequence: Synthetic Antisense oligonucleotide
  modified_base 1: mod_base = OTHER; note = bicyclic nucleic acid (BNA)
  modified_base 6: mod_base = OTHER; note = bicyclic nucleic acid (BNA)
  modified_base 13: mod_base = OTHER; note = bicyclic nucleic acid (BNA)
  modified_base 18: mod_base = OTHER; note = bicyclic nucleic acid (BNA)
  source 1..18: mol_type = other RNA
ggtaagttctgtccaagc

SEQ ID NO: 13002 - RNA, 18 nt, synthetic construct
  misc_feature 1..18: note = Description of Artificial Sequence: Synthetic Antisense oligonucleotide
  modified_base 1: mod_base = OTHER; note = bicyclic nucleic acid (BNA)
  modified_base 9: mod_base = OTHER; note = bicyclic nucleic acid (BNA)
  modified_base 11: mod_base = OTHER; note = bicyclic nucleic acid (BNA)
  modified_base 18: mod_base = OTHER; note = bicyclic nucleic acid (BNA)
  source 1..18: mol_type = other RNA
ggtaagttctgtccaagc

SEQ ID NO: 13003 - RNA, 18 nt, synthetic construct
  misc_feature 1..18: note = Description of Artificial Sequence: Synthetic Antisense oligonucleotide
  modified_base 1: mod_base = OTHER; note = bicyclic nucleic acid (BNA)
  modified_base 14: mod_base = OTHER; note = bicyclic nucleic acid (BNA)
  modified_base 17..18: mod_base = OTHER; note = bicyclic nucleic acid (BNA)
  source 1..18: mol_type = other RNA
ggtaagttctgtccaagc

SEQ ID NO: 13004 - RNA, 18 nt, synthetic construct
  misc_feature 1..18: note = Description of Artificial Sequence: Synthetic Antisense oligonucleotide
  modified_base 1: mod_base = OTHER; note = bicyclic nucleic acid (BNA)
  modified_base 11: mod_base = OTHER; note = bicyclic nucleic acid (BNA)
  modified_base 13: mod_base = OTHER; note = bicyclic nucleic acid (BNA)
  modified_base 18: mod_base = OTHER; note = bicyclic nucleic acid (BNA)
  source 1..18: mol_type = other RNA
ggtaagttctgtccaagc

SEQ ID NO: 13005 - RNA, 18 nt, synthetic construct
  misc_feature 1..18: note = Description of Artificial Sequence: Synthetic Antisense oligonucleotide
  modified_base 1..2: mod_base = OTHER; note = bicyclic nucleic acid (BNA)
  modified_base 6: mod_base = OTHER; note = bicyclic nucleic acid (BNA)
  modified_base 18: mod_base = OTHER; note = bicyclic nucleic acid (BNA)
  source 1..18: mol_type = other RNA
ggtaagttctgtccaagc

SEQ ID NO: 13006 - RNA, 18 nt, synthetic construct
  misc_feature 1..18: note = Description of Artificial Sequence: Synthetic Antisense oligonucleotide
  modified_base 1..2: mod_base = OTHER; note = bicyclic nucleic acid (BNA)
  modified_base 11: mod_base = OTHER; note = bicyclic nucleic acid (BNA)
  modified_base 18: mod_base = OTHER; note = bicyclic nucleic acid (BNA)
  source 1..18: mol_type = other RNA
ggtaagttctgtccaagc

SEQ ID NO: 13007 - RNA, 18 nt, synthetic construct
  misc_feature 1..18: note = Description of Artificial Sequence: Synthetic Antisense oligonucleotide
  modified_base 1: mod_base = OTHER; note = bicyclic nucleic acid (BNA)
  modified_base 9: mod_base = OTHER; note = bicyclic nucleic acid (BNA)
  modified_base 17..18: mod_base = OTHER; note = bicyclic nucleic acid (BNA)
  source 1..18: mol_type = other RNA
ggtaagttctgtccaagc

SEQ ID NO: 13008 - RNA, 18 nt, synthetic construct
  misc_feature 1..18: note = Description of Artificial Sequence: Synthetic Antisense oligonucleotide
  modified_base 1..2: mod_base = OTHER; note = bicyclic nucleic acid (BNA)
  modified_base 14: mod_base = OTHER; note = bicyclic nucleic acid (BNA)
  modified_base 18: mod_base = OTHER; note = bicyclic nucleic acid (BNA)
  source 1..18: mol_type = other RNA
ggtaagttctgtccaagc

SEQ ID NO: 13009 - RNA, 18 nt, synthetic construct
  misc_feature 1..18: note = Description of Artificial Sequence: Synthetic Antisense oligonucleotide
  modified_base 1: mod_base = OTHER; note = bicyclic nucleic acid (BNA)
  modified_base 11: mod_base = OTHER; note = bicyclic nucleic acid (BNA)
  modified_base 14: mod_base = OTHER; note = bicyclic nucleic acid (BNA)
  modified_base 18: mod_base = OTHER; note = bicyclic nucleic acid (BNA)
  source 1..18: mol_type = other RNA
ggtaagttctgtccaagc

SEQ ID NO: 13010 - RNA, 18 nt, synthetic construct
  misc_feature 1..18: note = Description of Artificial Sequence: Synthetic Antisense oligonucleotide
  modified_base 1: mod_base = OTHER; note = bicyclic nucleic acid (BNA)
  modified_base 6: mod_base = OTHER; note = bicyclic nucleic acid (BNA)
  modified_base 11: mod_base = OTHER; note = bicyclic nucleic acid (BNA)
  modified_base 18: mod_base = OTHER; note = bicyclic nucleic acid (BNA)
  source 1..18: mol_type = other RNA
ggtaagttctgtccaagc

SEQ ID NO: 13011 - RNA, 18 nt, synthetic construct
  misc_feature 1..18: note = Description of Artificial Sequence: Synthetic Antisense oligonucleotide
  modified_base 1..2: mod_base = OTHER; note = bicyclic nucleic acid (BNA)
  modified_base 13: mod_base = OTHER; note = bicyclic nucleic acid (BNA)
  modified_base 18: mod_base = OTHER; note = bicyclic nucleic acid (BNA)
  source 1..18: mol_type = other RNA
ggtaagttctgtccaagc

SEQ ID NO: 13012 - RNA, 18 nt, synthetic construct
  misc_feature 1..18: note = Description of Artificial Sequence: Synthetic Antisense oligonucleotide
  modified_base 1: mod_base = OTHER; note = bicyclic nucleic acid (BNA)
  modified_base 9: mod_base = OTHER; note = bicyclic nucleic acid (BNA)
  modified_base 13: mod_base = OTHER; note = bicyclic nucleic acid (BNA)
  modified_base 18: mod_base = OTHER; note = bicyclic nucleic acid (BNA)
  source 1..18: mol_type = other RNA
ggtaagttctgtccaagc

SEQ ID NO: 13013 - RNA, 18 nt, synthetic construct
  misc_feature 1..18: note = Description of Artificial Sequence: Synthetic Antisense oligonucleotide
  modified_base 1: mod_base = OTHER; note = bicyclic nucleic acid (BNA)
  modified_base 6: mod_base = OTHER; note = bicyclic nucleic acid (BNA)
  modified_base 17..18: mod_base = OTHER; note = bicyclic nucleic acid (BNA)
  source 1..18: mol_type = other RNA
ggtaagttctgtccaagc

SEQ ID NO: 13014 - RNA, 18 nt, synthetic construct
  misc_feature 1..18: note = Description of Artificial Sequence: Synthetic Antisense oligonucleotide
  modified_base 1: mod_base = OTHER; note = bicyclic nucleic acid (BNA)
  modified_base 11: mod_base = OTHER; note = bicyclic nucleic acid (BNA)
  modified_base 17..18: mod_base = OTHER; note = bicyclic nucleic acid (BNA)
  source 1..18: mol_type = other RNA
ggtaagttctgtccaagc

SEQ ID NO: 13015 - RNA, 18 nt, synthetic construct
  misc_feature 1..18: note = Description of Artificial Sequence: Synthetic Antisense oligonucleotide
  modified_base 1..2: mod_base = OTHER; note = bicyclic nucleic acid (BNA)
  modified_base 9: mod_base = OTHER; note = bicyclic nucleic acid (BNA)
  modified_base 18: mod_base = OTHER; note = bicyclic nucleic acid (BNA)
  source 1..18: mol_type = other RNA
ggtaagttctgtccaagc

SEQ ID NO: 13016 - RNA, 18 nt, synthetic construct
  misc_feature 1..18: note = Description of Artificial Sequence: Synthetic Antisense oligonucleotide
  modified_base 1: mod_base = OTHER; note = bicyclic nucleic acid (BNA)
  modified_base 12: mod_base = OTHER; note = bicyclic nucleic acid (BNA)
  modified_base 17..18: mod_base = OTHER; note = bicyclic nucleic acid (BNA)
  source 1..18: mol_type = other RNA
gtaagttctgtccaagcc

SEQ ID NO: 13017 - RNA, 18 nt, synthetic construct
  misc_feature 1..18: note = Description of Artificial Sequence: Synthetic Antisense oligonucleotide
  modified_base 1: mod_base = OTHER; note = bicyclic nucleic acid (BNA)
  modified_base 5: mod_base = OTHER; note = bicyclic nucleic acid (BNA)
  modified_base 8: mod_base = OTHER; note = bicyclic nucleic acid (BNA)
  modified_base 18: mod_base = OTHER; note = bicyclic nucleic acid (BNA)
  source 1..18: mol_type = other RNA
gtaagttctgtccaagcc

SEQ ID NO: 13018 - RNA, 18 nt, synthetic construct
  misc_feature 1..18: note = Description of Artificial Sequence: Synthetic Antisense oligonucleotide
  modified_base 1: mod_base = OTHER; note = bicyclic nucleic acid (BNA)
  modified_base 8: mod_base = OTHER; note = bicyclic nucleic acid (BNA)
  modified_base 13: mod_base = OTHER; note = bicyclic nucleic acid (BNA)
  modified_base 18: mod_base = OTHER; note = bicyclic nucleic acid (BNA)
  source 1..18: mol_type = other RNA
gtaagttctgtccaagcc

SEQ ID NO: 13019 - RNA, 18 nt, synthetic construct
  misc_feature 1..18: note = Description of Artificial Sequence: Synthetic Antisense oligonucleotide
  modified_base 1: mod_base = OTHER; note = bicyclic nucleic acid (BNA)
  modified_base 5: mod_base = OTHER; note = bicyclic nucleic acid (BNA)
  modified_base 13: mod_base = OTHER; note = bicyclic nucleic acid (BNA)
  modified_base 18: mod_base = OTHER; note = bicyclic nucleic acid (BNA)
  source 1..18: mol_type = other RNA
gtaagttctgtccaagcc

SEQ ID NO: 13020 - RNA, 18 nt, synthetic construct
  misc_feature 1..18: note = Description of Artificial Sequence: Synthetic Antisense oligonucleotide
  modified_base 1: mod_base = OTHER; note = bicyclic nucleic acid (BNA)
  modified_base 8: mod_base = OTHER; note = bicyclic nucleic acid (BNA)
  modified_base 17..18: mod_base = OTHER; note = bicyclic nucleic acid (BNA)
  source 1..18: mol_type = other RNA
gtaagttctgtccaagcc

SEQ ID NO: 13021 - RNA, 18 nt, synthetic construct
  misc_feature 1..18: note = Description of Artificial Sequence: Synthetic Antisense oligonucleotide
  modified_base 1: mod_base = OTHER; note = bicyclic nucleic acid (BNA)
  modified_base 13: mod_base = OTHER; note = bicyclic nucleic acid (BNA)
  modified_base 17..18: mod_base = OTHER; note = bicyclic nucleic acid (BNA)
  source 1..18: mol_type = other RNA
gtaagttctgtccaagcc

SEQ ID NO: 13022 - RNA, 18 nt, synthetic construct
  misc_feature 1..18: note = Description of Artificial Sequence: Synthetic Antisense oligonucleotide
  modified_base 1: mod_base = OTHER; note = bicyclic nucleic acid (BNA)
  modified_base 8: mod_base = OTHER; note = bicyclic nucleic acid (BNA)
  modified_base 12: mod_base = OTHER; note = bicyclic nucleic acid (BNA)
  modified_base 18: mod_base = OTHER; note = bicyclic nucleic acid (BNA)
  source 1..18: mol_type = other RNA
gtaagttctgtccaagcc

SEQ ID NO: 13023 - RNA, 18 nt, synthetic construct
  misc_feature 1..18: note = Description of Artificial Sequence: Synthetic Antisense oligonucleotide
  modified_base 1: mod_base = OTHER; note = bicyclic nucleic acid (BNA)
  modified_base 5: mod_base = OTHER; note = bicyclic nucleic acid (BNA)
  modified_base 10: mod_base = OTHER; note = bicyclic nucleic acid (BNA)
  modified_base 18: mod_base = OTHER; note = bicyclic nucleic acid (BNA)
  source 1..18: mol_type = other RNA
gtaagttctgtccaagcc

SEQ ID NO: 13024 - RNA, 18 nt, synthetic construct
  misc_feature 1..18: note = Description of Artificial Sequence: Synthetic Antisense oligonucleotide
  modified_base 1: mod_base = OTHER; note = bicyclic nucleic acid (BNA)
  modified_base 8: mod_base = OTHER; note = bicyclic nucleic acid (BNA)
  modified_base 16: mod_base = OTHER; note = bicyclic nucleic acid (BNA)
  modified_base 18: mod_base = OTHER; note = bicyclic nucleic acid (BNA)
  source 1..18: mol_type = other RNA
gtaagttctgtccaagcc

SEQ ID NO: 13025 - RNA, 18 nt, synthetic construct
  misc_feature 1..18: note = Description of Artificial Sequence: Synthetic Antisense oligonucleotide
  modified_base 1: mod_base = OTHER; note = bicyclic nucleic acid (BNA)
  modified_base 10: mod_base = OTHER; note = bicyclic nucleic acid (BNA)
  modified_base 16: mod_base = OTHER; note = bicyclic nucleic acid (BNA)
  modified_base 18: mod_base = OTHER; note = bicyclic nucleic acid (BNA)
  source 1..18: mol_type = other RNA
gtaagttctgtccaagcc

SEQ ID NO: 13026 - RNA, 18 nt, synthetic construct
  misc_feature 1..18: note = Description of Artificial Sequence: Synthetic Antisense oligonucleotide
  modified_base 1: mod_base = OTHER; note = bicyclic nucleic acid (BNA)
  modified_base 10: mod_base = OTHER; note = bicyclic nucleic acid (BNA)
  modified_base 12: mod_base = OTHER; note = bicyclic nucleic acid (BNA)
  modified_base 18: mod_base = OTHER; note = bicyclic nucleic acid (BNA)
  source 1..18: mol_type = other RNA
gtaagttctgtccaagcc

SEQ ID NO: 13027 - RNA, 18 nt, synthetic construct
  misc_feature 1..18: note = Description of Artificial Sequence: Synthetic Antisense oligonucleotide
  modified_base 1: mod_base = OTHER; note = bicyclic nucleic acid (BNA)
  modified_base 5: mod_base = OTHER; note = bicyclic nucleic acid (BNA)
  modified_base 17..18: mod_base = OTHER; note = bicyclic nucleic acid (BNA)
  source 1..18: mol_type = other RNA
gtaagttctgtccaagcc

SEQ ID NO: 13028 - RNA, 18 nt, synthetic construct
  misc_feature 1..18: note = Description of Artificial Sequence: Synthetic Antisense oligonucleotide
  modified_base 1: mod_base = OTHER; note = bicyclic nucleic acid (BNA)
  modified_base 10: mod_base = OTHER; note = bicyclic nucleic acid (BNA)
  modified_base 17..18: mod_base = OTHER; note = bicyclic nucleic acid (BNA)
  source 1..18: mol_type = other RNA
gtaagttctgtccaagcc

SEQ ID NO: 13029 - RNA, 18 nt, synthetic construct
  misc_feature 1..18: note = Description of Artificial Sequence: Synthetic Antisense oligonucleotide
  modified_base 1: mod_base = OTHER; note = bicyclic nucleic acid (BNA)
  modified_base 12..13: mod_base = OTHER; note = bicyclic nucleic acid (BNA)
  modified_base 18: mod_base = OTHER; note = bicyclic nucleic acid (BNA)
  source 1..18: mol_type = other RNA
gtaagttctgtccaagcc

SEQ ID NO: 13030 - RNA, 18 nt, synthetic construct
  misc_feature 1..18: note = Description of Artificial Sequence: Synthetic Antisense oligonucleotide
  modified_base 1: mod_base = OTHER; note = bicyclic nucleic acid (BNA)
  modified_base 5: mod_base = OTHER; note = bicyclic nucleic acid (BNA)
  modified_base 12: mod_base = OTHER; note = bicyclic nucleic acid (BNA)
  modified_base 18: mod_base = OTHER; note = bicyclic nucleic acid (BNA)
  source 1..18: mol_type = other RNA
gtaagttctgtccaagcc

SEQ ID NO: 13031 - RNA, 18 nt, synthetic construct
  misc_feature 1..18: note = Description of Artificial Sequence: Synthetic Antisense oligonucleotide
  modified_base 1: mod_base = OTHER; note = bicyclic nucleic acid (BNA)
  modified_base 8: mod_base = OTHER; note = bicyclic nucleic acid (BNA)
  modified_base 10: mod_base = OTHER; note = bicyclic nucleic acid (BNA)
  modified_base 18: mod_base = OTHER; note = bicyclic nucleic acid (BNA)
  source 1..18: mol_type = other RNA
gtaagttctgtccaagcc

SEQ ID NO: 13032 - RNA, 18 nt, synthetic construct
  misc_feature 1..18: note = Description of Artificial Sequence: Synthetic Antisense oligonucleotide
  modified_base 1: mod_base = OTHER; note = bicyclic nucleic acid (BNA)
  modified_base 13: mod_base = OTHER; note = bicyclic nucleic acid (BNA)
  modified_base 16: mod_base = OTHER; note = bicyclic nucleic acid (BNA)
  modified_base 18: mod_base = OTHER; note = bicyclic nucleic acid (BNA)
  source 1..18: mol_type = other RNA
gtaagttctgtccaagcc

SEQ ID NO: 13033 - RNA, 18 nt, synthetic construct
  misc_feature 1..18: note = Description of Artificial Sequence: Synthetic Antisense oligonucleotide
  modified_base 1: mod_base = OTHER; note = bicyclic nucleic acid (BNA)
  modified_base 5: mod_base = OTHER; note = bicyclic nucleic acid (BNA)
  modified_base 16: mod_base = OTHER; note = bicyclic nucleic acid (BNA)
  modified_base 18: mod_base = OTHER; note = bicyclic nucleic acid (BNA)
  source 1..18: mol_type = other RNA
gtaagttctgtccaagcc

SEQ ID NO: 13034 - RNA, 18 nt, synthetic construct
  misc_feature 1..18: note = Description of Artificial Sequence: Synthetic Antisense oligonucleotide
  modified_base 1: mod_base = OTHER; note = bicyclic nucleic acid (BNA)
  modified_base 12: mod_base = OTHER; note = bicyclic nucleic acid (BNA)
  modified_base 16: mod_base = OTHER; note = bicyclic nucleic acid (BNA)
  modified_base 18: mod_base = OTHER; note = bicyclic nucleic acid (BNA)
  source 1..18: mol_type = other RNA
gtaagttctgtccaagcc

SEQ ID NO: 13035 - RNA, 18 nt, synthetic construct
  misc_feature 1..18: note = Description of Artificial Sequence: Synthetic Antisense oligonucleotide
  modified_base 1: mod_base = OTHER; note = bicyclic nucleic acid (BNA)
  modified_base 16..18: mod_base = OTHER; note = bicyclic nucleic acid (BNA)
  source 1..18: mol_type = other RNA
gtaagttctgtccaagcc

SEQ ID NO: 13036 - RNA, 18 nt, synthetic construct
  misc_feature 1..18: note = Description of Artificial Sequence: Synthetic Antisense oligonucleotide
  modified_base 1: mod_base = OTHER; note = bicyclic nucleic acid (BNA)
  modified_base 10: mod_base = OTHER; note = bicyclic nucleic acid (BNA)
  modified_base 13: mod_base = OTHER; note = bicyclic nucleic acid (BNA)
  modified_base 18: mod_base = OTHER; note = bicyclic nucleic acid (BNA)
  source 1..18: mol_type = other RNA
gtaagttctgtccaagcc

SEQ ID NO: 13037 - RNA, 18 nt, synthetic construct
  misc_feature 1..18: note = Description of Artificial Sequence: Synthetic Antisense oligonucleotide
  modified_base 1: mod_base = OTHER; note = bicyclic nucleic acid (BNA)
  modified_base 6: mod_base = OTHER; note = bicyclic nucleic acid (BNA)
  modified_base 10: mod_base = OTHER; note = bicyclic nucleic acid (BNA)
  modified_base 18: mod_base = OTHER; note = bicyclic nucleic acid (BNA)
  source 1..18: mol_type = other RNA
agtcggtaagttctgtcc

SEQ ID NO: 13038 - RNA, 18 nt, synthetic construct
  misc_feature 1..18: note = Description of Artificial Sequence: Synthetic Antisense oligonucleotide
  modified_base 1..2: mod_base = OTHER; note = bicyclic nucleic acid (BNA)
  modified_base 4: mod_base = OTHER; note = bicyclic nucleic acid (BNA)
  modified_base 18: mod_base = OTHER; note = bicyclic nucleic acid (BNA)
  source 1..18: mol_type = other RNA
agtcggtaagttctgtcc

SEQ ID NO: 13039 - RNA, 18 nt, synthetic construct
  misc_feature 1..18: note = Description of Artificial Sequence: Synthetic Antisense oligonucleotide
  modified_base 1: mod_base = OTHER; note = bicyclic nucleic acid (BNA)
  modified_base 5: mod_base = OTHER; note = bicyclic nucleic acid (BNA)
  modified_base 13: mod_base = OTHER; note = bicyclic nucleic acid (BNA)
  modified_base 18: mod_base = OTHER; note = bicyclic nucleic acid (BNA)
  source 1..18: mol_type = other RNA
agtcggtaagttctgtcc

SEQ ID NO: 13040 - RNA, 18 nt, synthetic construct
  misc_feature 1..18: note = Description of Artificial Sequence: Synthetic Antisense oligonucleotide
  modified_base 1: mod_base = OTHER; note = bicyclic nucleic acid (BNA)
  modified_base 13: mod_base = OTHER; note = bicyclic nucleic acid (BNA)
  modified_base 17..18: mod_base = OTHER; note = bicyclic nucleic acid (BNA)
  source 1..18: mol_type = other RNA
agtcggtaagttctgtcc

SEQ ID NO: 13041 - RNA, 18 nt, synthetic construct
  misc_feature 1..18: note = Description of Artificial Sequence: Synthetic Antisense oligonucleotide
  modified_base 1: mod_base = OTHER; note = bicyclic nucleic acid (BNA)
  modified_base 4: mod_base = OTHER; note = bicyclic nucleic acid (BNA)
  modified_base 15: mod_base = OTHER; note = bicyclic nucleic acid (BNA)
  modified_base 18: mod_base = OTHER; note = bicyclic nucleic acid (BNA)
  source 1..18: mol_type = other RNA
agtcggtaagttctgtcc

SEQ ID NO: 13042 - RNA, 18 nt, synthetic construct
  misc_feature 1..18: note = Description of Artificial Sequence: Synthetic Antisense oligonucleotide
  modified_base 1: mod_base = OTHER; note = bicyclic nucleic acid (BNA)
  modified_base 5: mod_base = OTHER; note = bicyclic nucleic acid (BNA)
  modified_base 10: mod_base = OTHER; note = bicyclic nucleic acid (BNA)
  modified_base 18: mod_base = OTHER; note = bicyclic nucleic acid (BNA)
  source 1..18: mol_type = other RNA
agtcggtaagttctgtcc

SEQ ID NO: 13043 - RNA, 18 nt, synthetic construct
  misc_feature 1..18: note = Description of Artificial Sequence: Synthetic Antisense oligonucleotide
  modified_base 1..2: mod_base = OTHER; note = bicyclic nucleic acid (BNA)
  modified_base 17..18: mod_base = OTHER; note = bicyclic nucleic acid (BNA)
  source 1..18: mol_type = other RNA
agtcggtaagttctgtcc

SEQ ID NO: 13044 - RNA, 18 nt, synthetic construct
  misc_feature 1..18: note = Description of Artificial Sequence: Synthetic Antisense oligonucleotide
  modified_base 1: mod_base = OTHER; note = bicyclic nucleic acid (BNA)
  modified_base 6: mod_base = OTHER; note = bicyclic nucleic acid (BNA)
  modified_base 13: mod_base = OTHER; note = bicyclic nucleic acid (BNA)
  modified_base 18: mod_base = OTHER; note = bicyclic nucleic acid (BNA)
  source 1..18: mol_type = other RNA
agtcggtaagttctgtcc

SEQ ID NO: 13045 - RNA, 18 nt, synthetic construct
  misc_feature 1..18: note = Description of Artificial Sequence: Synthetic Antisense oligonucleotide
  modified_base 1..2: mod_base = OTHER; note = bicyclic nucleic acid (BNA)
  modified_base 15: mod_base = OTHER; note = bicyclic nucleic acid (BNA)
  modified_base 18: mod_base = OTHER; note = bicyclic nucleic acid (BNA)
  source 1..18: mol_type = other RNA
agtcggtaagttctgtcc

SEQ ID NO: 13046 - RNA, 18 nt, synthetic construct
  misc_feature 1..18: note = Description of Artificial Sequence: Synthetic Antisense oligonucleotide
  modified_base 1..2: mod_base = OTHER; note = bicyclic nucleic acid (BNA)
  modified_base 6: mod_base = OTHER; note = bicyclic nucleic acid (BNA)
  modified_base 18: mod_base = OTHER; note = bicyclic nucleic acid (BNA)
  source 1..18: mol_type = other RNA
agtcggtaagttctgtcc

SEQ ID NO: 13047 - RNA, 18 nt, synthetic construct
  misc_feature 1..18: note = Description of Artificial Sequence: Synthetic Antisense oligonucleotide
  modified_base 1: mod_base = OTHER; note = bicyclic nucleic acid (BNA)
  modified_base 4: mod_base = OTHER; note = bicyclic nucleic acid (BNA)
  modified_base 17..18: mod_base = OTHER; note = bicyclic nucleic acid (BNA)
  source 1..18: mol_type = other RNA
agtcggtaagttctgtcc

SEQ ID NO: 13048 - RNA, 18 nt, synthetic construct
  misc_feature 1..18: note = Description of Artificial Sequence: Synthetic Antisense oligonucleotide
  modified_base 1: mod_base = OTHER; note = bicyclic nucleic acid (BNA)
  modified_base 10: mod_base = OTHER; note = bicyclic nucleic acid (BNA)
  modified_base 15: mod_base = OTHER; note = bicyclic nucleic acid (BNA)
  modified_base 18: mod_base = OTHER; note = bicyclic nucleic acid (BNA)
  source 1..18: mol_type = other RNA
agtcggtaagttctgtcc

SEQ ID NO: 13049 - RNA, 18 nt, synthetic construct
  misc_feature 1..18: note = Description of Artificial Sequence: Synthetic Antisense oligonucleotide
  modified_base 1: mod_base = OTHER; note = bicyclic nucleic acid (BNA)
  modified_base 13: mod_base = OTHER; note = bicyclic nucleic acid (BNA)
  modified_base 15: mod_base = OTHER; note = bicyclic nucleic acid (BNA)
  modified_base 18: mod_base = OTHER; note = bicyclic nucleic acid (BNA)
  source 1..18: mol_type = other RNA
agtcggtaagttctgtcc

SEQ ID NO: 13050 - RNA, 18 nt, synthetic construct
  misc_feature 1..18: note = Description of Artificial Sequence: Synthetic Antisense oligonucleotide
  modified_base 1: mod_base = OTHER; note = bicyclic nucleic acid (BNA)
  modified_base 5..6: mod_base = OTHER; note = bicyclic nucleic acid (BNA)
  modified_base 18: mod_base = OTHER; note = bicyclic nucleic acid (BNA)
  source 1..18: mol_type = other RNA
agtcggtaagttctgtcc

SEQ ID NO: 13051 - RNA, 18 nt, synthetic construct
  misc_feature 1..18: note = Description of Artificial Sequence: Synthetic Antisense oligonucleotide
  modified_base 1: mod_base = OTHER; note = bicyclic nucleic acid (BNA)
  modified_base 5: mod_base = OTHER; note = bicyclic nucleic acid (BNA)
  modified_base 15: mod_base = OTHER; note = bicyclic nucleic acid (BNA)
  modified_base 18: mod_base = OTHER; note = bicyclic nucleic acid (BNA)
  source 1..18: mol_type = other RNA
agtcggtaagttctgtcc

SEQ ID NO: 13052 - RNA, 18 nt, synthetic construct
  misc_feature 1..18: note = Description of Artificial Sequence: Synthetic Antisense oligonucleotide
  modified_base 1..2: mod_base = OTHER; note = bicyclic nucleic acid (BNA)
  modified_base 5: mod_base = OTHER; note = bicyclic nucleic acid (BNA)
  modified_base 18: mod_base = OTHER; note = bicyclic nucleic acid (BNA)
  source 1..18: mol_type = other RNA
agtcggtaagttctgtcc

SEQ ID NO: 13053 - RNA, 18 nt, synthetic construct
  misc_feature 1..18: note = Description of Artificial Sequence: Synthetic Antisense oligonucleotide
  modified_base 1: mod_base = OTHER; note = bicyclic nucleic acid (BNA)
  modified_base 5: mod_base = OTHER; note = bicyclic nucleic acid (BNA)
  modified_base 17..18: mod_base = OTHER; note = bicyclic nucleic acid (BNA)
  source 1..18: mol_type = other RNA
agtcggtaagttctgtcc

SEQ ID NO: 13054 - RNA, 18 nt, synthetic construct
  misc_feature 1..18: note = Description of Artificial Sequence: Synthetic Antisense oligonucleotide
  modified_base 1: mod_base = OTHER; note = bicyclic nucleic acid (BNA)
  modified_base 10: mod_base = OTHER; note = bicyclic nucleic acid (BNA)
  modified_base 17..18: mod_base = OTHER; note = bicyclic nucleic acid (BNA)
  source 1..18: mol_type = other RNA
agtcggtaagttctgtcc

SEQ ID NO: 13055 - RNA, 18 nt, synthetic construct
  misc_feature 1..18: note = Description of Artificial Sequence: Synthetic Antisense oligonucleotide
  modified_base 1: mod_base = OTHER; note = bicyclic nucleic acid (BNA)
  modified_base 4: mod_base = OTHER; note = bicyclic nucleic acid (BNA)
  modified_base 10: mod_base = OTHER; note = bicyclic nucleic acid (BNA)
  modified_base 18: mod_base = OTHER; note = bicyclic nucleic acid (BNA)
  source 1..18: mol_type = other RNA
agtcggtaagttctgtcc

SEQ ID NO: 13056 - RNA, 18 nt, synthetic construct
  misc_feature 1..18: note = Description of Artificial Sequence: Synthetic Antisense oligonucleotide
  modified_base 1..2: mod_base = OTHER; note = bicyclic nucleic acid (BNA)
  modified_base 10: mod_base = OTHER; note = bicyclic nucleic acid (BNA)
  modified_base 18: mod_base = OTHER; note = bicyclic nucleic acid (BNA)
  source 1..18: mol_type = other RNA
agtcggtaagttctgtcc

SEQ ID NO: 13057 - RNA, 18 nt, synthetic construct
  misc_feature 1..18: note = Description of Artificial Sequence: Synthetic Antisense oligonucleotide
  modified_base 1: mod_base = OTHER; note = bicyclic nucleic acid (BNA)
  modified_base 4: mod_base = OTHER; note = bicyclic nucleic acid (BNA)
  modified_base 6: mod_base = OTHER; note = bicyclic nucleic acid (BNA)
  modified_base 18: mod_base = OTHER; note = bicyclic nucleic acid (BNA)
  source 1..18: mol_type = other RNA
agtcggtaagttctgtcc

SEQ ID NO: 13058 - RNA, 18 nt, synthetic construct
  misc_feature 1..18: note = Description of Artificial Sequence: Synthetic Antisense oligonucleotide
  modified_base 1: mod_base = OTHER; note = bicyclic nucleic acid (BNA)
  modified_base 4: mod_base = OTHER; note = bicyclic nucleic acid (BNA)
  modified_base 13: mod_base = OTHER; note = bicyclic nucleic acid (BNA)
  modified_base 18: mod_base = OTHER; note = bicyclic nucleic acid (BNA)
  source 1..18: mol_type = other RNA
agtcggtaagttctgtcc

SEQ ID NO: 13059 - RNA, 18 nt, synthetic construct
  misc_feature 1..18: note = Description of Artificial Sequence: Synthetic Antisense oligonucleotide
  modified_base 1: mod_base = OTHER; note = bicyclic nucleic acid (BNA)
  modified_base 15: mod_base = OTHER; note = bicyclic nucleic acid (BNA)
  modified_base 17..18: mod_base = OTHER; note = bicyclic nucleic acid (BNA)
  source 1..18: mol_type = other RNA
agtcggtaagttctgtcc

SEQ ID NO: 13060 - RNA, 18 nt, synthetic construct
  misc_feature 1..18: note = Description of Artificial Sequence: Synthetic Antisense oligonucleotide
  modified_base 1..2: mod_base = OTHER; note = bicyclic nucleic acid (BNA)
  modified_base 13: mod_base = OTHER; note = bicyclic nucleic acid (BNA)
  modified_base 18: mod_base = OTHER; note = bicyclic nucleic acid (BNA)
  source 1..18: mol_type = other RNA
agtcggtaagttctgtcc

SEQ ID NO: 13061 - RNA, 18 nt, synthetic construct
  misc_feature 1..18: note = Description of Artificial Sequence: Synthetic Antisense oligonucleotide
  modified_base 1: mod_base = OTHER; note = bicyclic nucleic acid (BNA)
  modified_base 6: mod_base = OTHER; note = bicyclic nucleic acid (BNA)
  modified_base 17..18: mod_base = OTHER; note = bicyclic nucleic acid (BNA)
  source 1..18: mol_type = other RNA
agtcggtaagttctgtcc

SEQ ID NO: 13062 - RNA, 18 nt, synthetic construct
  misc_feature 1..18: note = Description of Artificial Sequence: Synthetic Antisense oligonucleotide
  modified_base 1: mod_base = OTHER; note = bicyclic nucleic acid (BNA)
  modified_base 6: mod_base = OTHER; note = bicyclic nucleic acid (BNA)
  modified_base 15: mod_base = OTHER; note = bicyclic nucleic acid (BNA)
  modified_base 18: mod_base = OTHER; note = bicyclic nucleic acid (BNA)
  source 1..18: mol_type = other RNA
agtcggtaagttctgtcc

SEQ ID NO: 13063 - RNA, 18 nt, synthetic construct
  misc_feature 1..18: note = Description of Artificial Sequence: Synthetic Antisense oligonucleotide
  modified_base 1: mod_base = OTHER; note = bicyclic nucleic acid (BNA)
  modified_base 4..5: mod_base = OTHER; note = bicyclic nucleic acid (BNA)
  modified_base 18: mod_base = OTHER; note = bicyclic nucleic acid (BNA)
  source 1..18: mol_type = other RNA
agtcggtaagttctgtcc

SEQ ID NO: 13064 - RNA, 18 nt, synthetic construct
  misc_feature 1..18: note = Description of Artificial Sequence: Synthetic Antisense oligonucleotide
  modified_base 1: mod_base = OTHER; note = bicyclic nucleic acid (BNA)
  modified_base 10: mod_base = OTHER; note = bicyclic nucleic acid (BNA)
  modified_base 13: mod_base = OTHER; note = bicyclic nucleic acid (BNA)
  modified_base 18: mod_base = OTHER; note = bicyclic nucleic acid (BNA)
  source 1..18: mol_type = other RNA
agtcggtaagttctgtcc

SEQ ID NO: 13065 - RNA, 18 nt, synthetic construct
  misc_feature 1..18: note = Description of Artificial Sequence: Synthetic Antisense oligonucleotide
  modified_base 1: mod_base = OTHER; note = bicyclic nucleic acid (BNA)
  modified_base 12: mod_base = OTHER; note = bicyclic nucleic acid (BNA)
  modified_base 17..18: mod_base = OTHER; note = bicyclic nucleic acid (BNA)
  source 1..18: mol_type = other RNA
ctgtccaagcccggttga

SEQ ID NO: 13066 - RNA, 18 nt, synthetic construct
  misc_feature 1..18: note = Description of Artificial Sequence: Synthetic Antisense oligonucleotide
  modified_base 1: mod_base = OTHER; note = bicyclic nucleic acid (BNA)
  modified_base 6: mod_base = OTHER; note = bicyclic nucleic acid (BNA)
  modified_base 10: mod_base = OTHER; note = bicyclic nucleic acid (BNA)
  modified_base 18: mod_base = OTHER; note = bicyclic nucleic acid (BNA)
  source 1..18: mol_type = other RNA
ctgtccaagcccggttga

SEQ ID NO: 13067 - RNA, 18 nt, synthetic construct
  misc_feature 1..18: note = Description of Artificial Sequence: Synthetic Antisense oligonucleotide
  modified_base 1: mod_base = OTHER; note = bicyclic nucleic acid (BNA)
  modified_base 9: mod_base = OTHER; note = bicyclic nucleic acid (BNA)
  modified_base 14: mod_base = OTHER; note = bicyclic nucleic acid (BNA)
  modified_base 18: mod_base = OTHER; note = bicyclic nucleic acid (BNA)
  source 1..18: mol_type = other RNA
ctgtccaagcccggttga

SEQ ID NO: 13068 - RNA, 18 nt, synthetic construct
  misc_feature 1..18: note = Description of Artificial Sequence: Synthetic Antisense oligonucleotide
  modified_base 1: mod_base = OTHER; note = bicyclic nucleic acid (BNA)
  modified_base 11..12: mod_base = OTHER; note = bicyclic nucleic acid (BNA)
  modified_base 18: mod_base = OTHER; note = bicyclic nucleic acid (BNA)
  source 1..18: mol_type = other RNA
ctgtccaagcccggttga

SEQ ID NO: 13069 - RNA, 18 nt, synthetic construct
  misc_feature 1..18: note = Description of Artificial Sequence: Synthetic Antisense oligonucleotide
  modified_base 1: mod_base = OTHER; note = bicyclic nucleic acid (BNA)
  modified_base 5: mod_base = OTHER; note = bicyclic nucleic acid (BNA)
  modified_base 9: mod_base = OTHER; note = bicyclic nucleic acid (BNA)
  modified_base 18: mod_base = OTHER; note = bicyclic nucleic acid (BNA)
  source 1..18: mol_type = other RNA
ctgtccaagcccggttga

SEQ ID NO: 13070 - RNA, 18 nt, synthetic construct
  misc_feature 1..18: note = Description of Artificial Sequence: Synthetic Antisense oligonucleotide
  modified_base 1: mod_base = OTHER; note = bicyclic nucleic acid (BNA)
  modified_base 3: mod_base = OTHER; note = bicyclic nucleic acid (BNA)
  modified_base 9: mod_base = OTHER; note = bicyclic nucleic acid (BNA)
  modified_base 18: mod_base = OTHER; note = bicyclic nucleic acid (BNA)
  source 1..18: mol_type = other RNA
ctgtccaagcccggttga

SEQ ID NO: 13071 - RNA, 18 nt, synthetic construct
  misc_feature 1..18: note = Description of Artificial Sequence: Synthetic Antisense oligonucleotide
  modified_base 1: mod_base = OTHER; note = bicyclic nucleic acid (BNA)
  modified_base 6: mod_base = OTHER; note = bicyclic nucleic acid (BNA)
  modified_base 14: mod_base = OTHER; note = bicyclic nucleic acid (BNA)
  modified_base 18: mod_base = OTHER; note = bicyclic nucleic acid (BNA)
  source 1..18: mol_type = other RNA
ctgtccaagcccggttga

SEQ ID NO: 13072 - RNA, 18 nt, synthetic construct
  misc_feature 1..18: note = Description of Artificial Sequence: Synthetic Antisense oligonucleotide
  modified_base 1: mod_base = OTHER; note = bicyclic nucleic acid (BNA)
  modified_base 9..10: mod_base = OTHER; note = bicyclic nucleic acid (BNA)
  modified_base 18: mod_base = OTHER; note = bicyclic nucleic acid (BNA)
  source 1..18: mol_type = other RNA
ctgtccaagcccggttga

SEQ ID NO: 13073 - RNA, 18 nt, synthetic construct
  misc_feature 1..18: note = Description of Artificial Sequence: Synthetic Antisense oligonucleotide
  modified_base 1: mod_base = OTHER; note = bicyclic nucleic acid (BNA)
  modified_base 5: mod_base = OTHER; note = bicyclic nucleic acid (BNA)
  modified_base 13: mod_base = OTHER; note = bicyclic nucleic acid (BNA)
  modified_base 18: mod_base = OTHER; note = bicyclic nucleic acid (BNA)
  source 1..18: mol_type = other RNA
ctgtccaagcccggttga

SEQ ID NO: 13074 - RNA, 18 nt, synthetic construct
  misc_feature 1..18: note = Description of Artificial Sequence: Synthetic Antisense oligonucleotide
  modified_base 1: mod_base = OTHER; note = bicyclic nucleic acid (BNA)
  modified_base 3: mod_base = OTHER; note = bicyclic nucleic acid (BNA)
  modified_base 13: mod_base = OTHER; note = bicyclic nucleic acid (BNA)
  modified_base 18: mod_base = OTHER; note = bicyclic nucleic acid (BNA)
  source 1..18: mol_type = other RNA
ctgtccaagcccggttga

SEQ ID NO: 13075 - RNA, 18 nt, synthetic construct
  misc_feature 1..18: note = Description of Artificial Sequence: Synthetic Antisense oligonucleotide
  modified_base 1: mod_base = OTHER; note = bicyclic nucleic acid (BNA)
  modified_base 13: mod_base = OTHER; note = bicyclic nucleic acid (BNA)
  modified_base 17..18: mod_base = OTHER; note = bicyclic nucleic acid (BNA)
  source 1..18: mol_type = other RNA
ctgtccaagcccggttga

SEQ ID NO: 13076 - RNA, 18 nt, synthetic construct
  misc_feature 1..18: note = Description of Artificial Sequence: Synthetic Antisense oligonucleotide
  modified_base 1: mod_base = OTHER; note = bicyclic nucleic acid (BNA)
  modified_base 3: mod_base = OTHER; note = bicyclic nucleic acid (BNA)
  modified_base 6: mod_base = OTHER; note = bicyclic nucleic acid (BNA)
  modified_base 18: mod_base = OTHER; note = bicyclic nucleic acid (BNA)
  source 1..18: mol_type = other RNA
ctgtccaagcccggttga

SEQ ID NO: 13077 - RNA, 18 nt, synthetic construct
  misc_feature 1..18: note = Description of Artificial Sequence: Synthetic Antisense oligonucleotide
  modified_base 1: mod_base = OTHER; note = bicyclic nucleic acid (BNA)
  modified_base 6: mod_base = OTHER; note = bicyclic nucleic acid (BNA)
  modified_base 9: mod_base = OTHER; note = bicyclic nucleic acid (BNA)
  modified_base 18: mod_base = OTHER; note = bicyclic nucleic acid (BNA)
  source 1..18: mol_type = other RNA
ctgtccaagcccggttga

SEQ ID NO: 13078 - RNA, 18 nt, synthetic construct
  misc_feature 1..18: note = Description of Artificial Sequence: Synthetic Antisense oligonucleotide
  modified_base 1: mod_base = OTHER; note = bicyclic nucleic acid (BNA)
  modified_base 5: mod_base = OTHER; note = bicyclic nucleic acid (BNA)
  modified_base 10: mod_base = OTHER; note = bicyclic nucleic acid (BNA)
  modified_base 18: mod_base = OTHER; note = bicyclic nucleic acid (BNA)
  source 1..18: mol_type = other RNA
ctgtccaagcccggttga

SEQ ID NO: 13079 - RNA, 18 nt, synthetic construct
  misc_feature 1..18: note = Description of Artificial Sequence: Synthetic Antisense oligonucleotide
  modified_base 1: mod_base = OTHER; note = bicyclic nucleic acid (BNA)
  modified_base 3: mod_base = OTHER; note = bicyclic nucleic acid (BNA)
  modified_base 10: mod_base = OTHER; note = bicyclic nucleic acid (BNA)
  modified_base 18: mod_base = OTHER; note = bicyclic nucleic acid (BNA)
  source 1..18: mol_type = other RNA
ctgtccaagcccggttga

SEQ ID NO: 13080 - RNA, 18 nt, synthetic construct
  misc_feature 1..18: note = Description of Artificial Sequence: Synthetic Antisense oligonucleotide
  modified_base 1: mod_base = OTHER; note = bicyclic nucleic acid (BNA)
  modified_base 13..14: mod_base = OTHER; note = bicyclic nucleic acid (BNA)
  modified_base 18: mod_base = OTHER; note = bicyclic nucleic acid (BNA)
  source 1..18: mol_type = other RNA
ctgtccaagcccggttga

SEQ ID NO: 13081 - RNA, 18 nt, synthetic construct
  misc_feature 1..18: note = Description of Artificial Sequence: Synthetic Antisense oligonucleotide
  modified_base 1: mod_base = OTHER; note = bicyclic nucleic acid (BNA)
  modified_base 6: mod_base = OTHER; note = bicyclic nucleic acid (BNA)
  modified_base 13: mod_base = OTHER; note = bicyclic nucleic acid (BNA)
  modified_base 18: mod_base = OTHER; note = bicyclic nucleic acid (BNA)
  source 1..18: mol_type = other RNA
ctgtccaagcccggttga

SEQ ID NO: 13082 - RNA, 18 nt, synthetic construct
  misc_feature 1..18: note = Description of Artificial Sequence: Synthetic Antisense oligonucleotide
  modified_base 1: mod_base = OTHER; note = bicyclic nucleic acid (BNA)
  modified_base 9: mod_base = OTHER; note = bicyclic nucleic acid (BNA)
  modified_base 11: mod_base = OTHER; note = bicyclic nucleic acid (BNA)
  modified_base 18: mod_base = OTHER; note = bicyclic nucleic acid (BNA)
  source 1..18: mol_type = other RNA
ctgtccaagcccggttga

SEQ ID NO: 13083 - RNA, 18 nt, synthetic construct
  misc_feature 1..18: note = Description of Artificial Sequence: Synthetic Antisense oligonucleotide
  modified_base 1: mod_base = OTHER; note = bicyclic nucleic acid (BNA)
  modified_base 14: mod_base = OTHER; note = bicyclic nucleic acid (BNA)
  modified_base 17..18: mod_base = OTHER; note = bicyclic nucleic acid (BNA)
  source 1..18: mol_type = other RNA
ctgtccaagcccggttga

SEQ ID NO: 13084 - RNA, 18 nt, synthetic construct
  misc_feature 1..18: note = Description of Artificial Sequence: Synthetic Antisense oligonucleotide
  modified_base 1: mod_base = OTHER; note = bicyclic nucleic acid (BNA)
  modified_base 11: mod_base = OTHER; note = bicyclic nucleic acid (BNA)
  modified_base 13: mod_base = OTHER; note = bicyclic nucleic acid (BNA)
  modified_base 18: mod_base = OTHER; note = bicyclic nucleic acid (BNA)
  source 1..18: mol_type = other RNA
ctgtccaagcccggttga

SEQ ID NO: 13085 - RNA, 18 nt, synthetic construct
  misc_feature 1..18: note = Description of Artificial Sequence: Synthetic Antisense oligonucleotide
  modified_base 1: mod_base = OTHER; note = bicyclic nucleic acid (BNA)
  modified_base 5: mod_base = OTHER; note = bicyclic nucleic acid (BNA)
  modified_base 14: mod_base = OTHER; note = bicyclic nucleic acid (BNA)
  modified_base 18: mod_base = OTHER; note = bicyclic nucleic acid (BNA)
  source 1..18: mol_type = other RNA
ctgtccaagcccggttga

SEQ ID NO: 13086 - RNA, 18 nt, synthetic construct
  misc_feature 1..18: note = Description of Artificial Sequence: Synthetic Antisense oligonucleotide
  modified_base 1: mod_base = OTHER; note = bicyclic nucleic acid (BNA)
  modified_base 3: mod_base = OTHER; note = bicyclic nucleic acid (BNA)
  modified_base 14: mod_base = OTHER; note = bicyclic nucleic acid (BNA)
  modified_base 18: mod_base = OTHER; note = bicyclic nucleic acid (BNA)
  source 1..18: mol_type = other RNA
ctgtccaagcccggttga

SEQ ID NO: 13087 - RNA, 18 nt, synthetic construct
  misc_feature 1..18: note = Description of Artificial Sequence: Synthetic Antisense oligonucleotide
  modified_base 1: mod_base = OTHER; note = bicyclic nucleic acid (BNA)
  modified_base 10: mod_base = OTHER; note = bicyclic nucleic acid (BNA)
  modified_base 12: mod_base = OTHER; note = bicyclic nucleic acid (BNA)
  modified_base 18: mod_base = OTHER; note = bicyclic nucleic acid (BNA)
  source 1..18: mol_type = other RNA
ctgtccaagcccggttga

SEQ ID NO: 13088 - RNA, 18 nt, synthetic construct
  misc_feature 1..18: note = Description of Artificial Sequence: Synthetic Antisense oligonucleotide
  modified_base 1: mod_base = OTHER; note = bicyclic nucleic acid (BNA)
  modified_base 9: mod_base = OTHER; note = bicyclic nucleic acid (BNA)
  modified_base 17..18: mod_base = OTHER; note = bicyclic nucleic acid (BNA)
  source 1..18: mol_type = other RNA
ctgtccaagcccggttga

SEQ ID NO: 13089 - RNA, 18 nt, synthetic construct
  misc_feature 1..18: note = Description of Artificial Sequence: Synthetic Antisense oligonucleotide
  modified_base 1: mod_base = OTHER; note = bicyclic nucleic acid (BNA)
  modified_base 12: mod_base = OTHER; note = bicyclic nucleic acid (BNA)
  modified_base 14: mod_base = OTHER; note = bicyclic nucleic acid (BNA)
  modified_base 18: mod_base = OTHER; note = bicyclic nucleic acid (BNA)
  source 1..18: mol_type = other RNA
ctgtccaagcccggttga

SEQ ID NO: 13090 - RNA, 18 nt, synthetic construct
  misc_feature 1..18: note = Description of Artificial Sequence: Synthetic Antisense oligonucleotide
  modified_base 1: mod_base = OTHER; note = bicyclic nucleic acid (BNA)
  modified_base 5: mod_base = OTHER; note = bicyclic nucleic acid (BNA)
  modified_base 11: mod_base = OTHER; note = bicyclic nucleic acid (BNA)
  modified_base 18: mod_base = OTHER; note = bicyclic nucleic acid (BNA)
  source 1..18: mol_type = other RNA
ctgtccaagcccggttga

SEQ ID NO: 13091 - RNA, 18 nt, synthetic construct
  misc_feature 1..18: note = Description of Artificial Sequence: Synthetic Antisense oligonucleotide
  modified_base 1: mod_base = OTHER; note = bicyclic nucleic acid (BNA)
  modified_base 3: mod_base = OTHER; note = bicyclic nucleic acid (BNA)
  modified_base 17..18: mod_base = OTHER; note = bicyclic nucleic acid (BNA)
  source 1..18: mol_type = other RNA
ctgtccaagcccggttga

SEQ ID NO: 13092 - RNA, 18 nt, synthetic construct
  misc_feature 1..18: note = Description of Artificial Sequence: Synthetic Antisense oligonucleotide
  modified_base 1: mod_base = OTHER; note = bicyclic nucleic acid (BNA)
  modified_base 6: mod_base = OTHER; note = bicyclic nucleic acid (BNA)
  modified_base 12: mod_base = OTHER; note = bicyclic nucleic acid (BNA)
  modified_base 18: mod_base = OTHER; note = bicyclic nucleic acid (BNA)
  source 1..18: mol_type = other RNA
ctgtccaagcccggttga

SEQ ID NO: 13093 - RNA, 18 nt, synthetic construct
  misc_feature 1..18: note = Description of Artificial Sequence: Synthetic Antisense oligonucleotide
  modified_base 1: mod_base = OTHER; note = bicyclic nucleic acid (BNA)
  modified_base 5..6: mod_base = OTHER; note = bicyclic nucleic acid (BNA)
  modified_base 18: mod_base = OTHER; note = bicyclic nucleic acid (BNA)
  source 1..18: mol_type = other RNA
ctgtccaagcccggttga

SEQ ID NO: 13094 - RNA, 18 nt, synthetic construct
  misc_feature 1..18: note = Description of Artificial Sequence: Synthetic Antisense oligonucleotide
  modified_base 1: mod_base = OTHER; note = bicyclic nucleic acid (BNA)
  modified_base 11: mod_base = OTHER; note = bicyclic nucleic acid (BNA)
  modified_base 14: mod_base = OTHER; note = bicyclic nucleic acid (BNA)
  modified_base 18: mod_base = OTHER; note = bicyclic nucleic acid (BNA)
  source 1..18: mol_type = other RNA
ctgtccaagcccggttga

SEQ ID NO: 13095 - RNA, 18 nt, synthetic construct
  misc_feature 1..18: note = Description of Artificial Sequence: Synthetic Antisense oligonucleotide
  modified_base 1: mod_base = OTHER; note = bicyclic nucleic acid (BNA)
  modified_base 9: mod_base = OTHER; note = bicyclic nucleic acid (BNA)
  modified_base 12: mod_base = OTHER; note = bicyclic nucleic acid (BNA)
  modified_base 18: mod_base = OTHER; note = bicyclic nucleic acid (BNA)
  source 1..18: mol_type = other RNA
ctgtccaagcccggttga

SEQ ID NO: 13096 - RNA, 18 nt, synthetic construct
  misc_feature 1..18: note = Description of Artificial Sequence: Synthetic Antisense oligonucleotide
  modified_base 1: mod_base = OTHER; note = bicyclic nucleic acid (BNA)
  modified_base 5: mod_base = OTHER; note = bicyclic nucleic acid (BNA)
  modified_base 17..18: mod_base = OTHER; note = bicyclic nucleic acid (BNA)
  source 1..18: mol_type = other RNA
ctgtccaagcccggttga

SEQ ID NO: 13097 - RNA, 18 nt, synthetic construct
  misc_feature 1..18: note = Description of Artificial Sequence: Synthetic Antisense oligonucleotide
  modified_base 1: mod_base = OTHER; note = bicyclic nucleic acid (BNA)
  modified_base 3: mod_base = OTHER; note = bicyclic nucleic acid (BNA)
  modified_base 11: mod_base = OTHER; note = bicyclic nucleic acid (BNA)
  modified_base 18: mod_base = OTHER; note = bicyclic nucleic acid (BNA)
  source 1..18: mol_type = other RNA
ctgtccaagcccggttga

SEQ ID NO: 13098 - RNA, 18 nt, synthetic construct
  misc_feature 1..18: note = Description of Artificial Sequence: Synthetic Antisense oligonucleotide
  modified_base 1: mod_base = OTHER; note = bicyclic nucleic acid (BNA)
  modified_base 10..11: mod_base = OTHER; note = bicyclic nucleic acid (BNA)
  modified_base 18: mod_base = OTHER; note = bicyclic nucleic acid (BNA)
  source 1..18: mol_type = other RNA
ctgtccaagcccggttga

SEQ ID NO: 13099 - RNA, 18 nt, synthetic construct
  misc_feature 1..18: note = Description of Artificial Sequence: Synthetic Antisense oligonucleotide
  modified_base 1: mod_base = OTHER; note = bicyclic nucleic acid (BNA)
  modified_base 10: mod_base = OTHER; note = bicyclic nucleic acid (BNA)
  modified_base 17..18: mod_base = OTHER; note = bicyclic nucleic acid (BNA)
  source 1..18: mol_type = other RNA
ctgtccaagcccggttga

SEQ ID NO: 13100 - RNA, 18 nt, synthetic construct
  misc_feature 1..18: note = Description of Artificial Sequence: Synthetic Antisense oligonucleotide
  modified_base 1: mod_base = OTHER; note = bicyclic nucleic acid (BNA)
  modified_base 12..13: mod_base = OTHER; note = bicyclic nucleic acid (BNA)
  modified_base 18: mod_base = OTHER; note = bicyclic nucleic acid (BNA)
  source 1..18: mol_type = other RNA
ctgtccaagcccggttga

SEQ ID NO: 13101 - RNA, 18 nt, synthetic construct
  misc_feature 1..18: note = Description of Artificial Sequence: Synthetic Antisense oligonucleotide
  modified_base 1: mod_base = OTHER; note = bicyclic nucleic acid (BNA)
  modified_base 5: mod_base = OTHER; note = bicyclic nucleic acid (BNA)
  modified_base 12: mod_base = OTHER; note = bicyclic nucleic acid (BNA)
  modified_base 18: mod_base = OTHER; note = bicyclic nucleic acid (BNA)
  source 1..18: mol_type = other RNA
ctgtccaagcccggttga

SEQ ID NO: 13102 - RNA, 18 nt, synthetic construct
  misc_feature 1..18: note = Description of Artificial Sequence: Synthetic Antisense oligonucleotide
  modified_base 1: mod_base = OTHER; note = bicyclic nucleic acid (BNA)
  modified_base 10: mod_base = OTHER; note = bicyclic nucleic acid (BNA)
  modified_base 14: mod_base = OTHER; note = bicyclic nucleic acid (BNA)
  modified_base 18: mod_base = OTHER; note = bicyclic nucleic acid (BNA)
  source 1..18: mol_type = other RNA
ctgtccaagcccggttga

SEQ ID NO: 13103 - RNA, 18 nt, synthetic construct
  misc_feature 1..18: note = Description of Artificial Sequence: Synthetic Antisense oligonucleotide
  modified_base 1: mod_base = OTHER; note = bicyclic nucleic acid (BNA)
  modified_base 6: mod_base = OTHER; note = bicyclic nucleic acid (BNA)
  modified_base 11: mod_base = OTHER; note = bicyclic nucleic acid (BNA)
  modified_base 18: mod_base = OTHER; note = bicyclic nucleic acid (BNA)
  source 1..18: mol_type = other RNA
ctgtccaagcccggttga

SEQ ID NO: 13104 - RNA, 18 nt, synthetic construct
  misc_feature 1..18: note = Description of Artificial Sequence: Synthetic Antisense oligonucleotide
  modified_base 1: mod_base = OTHER; note = bicyclic nucleic acid (BNA)
  modified_base 6: mod_base = OTHER; note = bicyclic nucleic acid (BNA)
  modified_base 17..18: mod_base = OTHER; note = bicyclic nucleic acid (BNA)
  source 1..18: mol_type = other RNA
ctgtccaagcccggttga

SEQ ID NO: 13105 - RNA, 18 nt, synthetic construct
  misc_feature 1..18: note = Description of Artificial Sequence: Synthetic Antisense oligonucleotide
  modified_base 1: mod_base = OTHER; note = bicyclic nucleic acid (BNA)
  modified_base 9: mod_base = OTHER; note = bicyclic nucleic acid (BNA)
  modified_base 13: mod_base = OTHER; note = bicyclic nucleic acid (BNA)
  modified_base 18: mod_base = OTHER; note = bicyclic nucleic acid (BNA)
  source 1..18: mol_type = other RNA
ctgtccaagcccggttga

SEQ ID NO: 13106 - RNA, 18 nt, synthetic construct
  misc_feature 1..18: note = Description of Artificial Sequence: Synthetic Antisense oligonucleotide
  modified_base 1: mod_base = OTHER; note = bicyclic nucleic acid (BNA)
  modified_base 11: mod_base = OTHER; note = bicyclic nucleic acid (BNA)
  modified_base 17..18: mod_base = OTHER; note = bicyclic nucleic acid (BNA)
  source 1..18: mol_type = other RNA
ctgtccaagcccggttga

SEQ ID NO: 13107 - RNA, 18 nt, synthetic construct
  misc_feature 1..18: note = Description of Artificial Sequence: Synthetic Antisense oligonucleotide
  modified_base 1: mod_base = OTHER; note = bicyclic nucleic acid (BNA)
  modified_base 3: mod_base = OTHER; note = bicyclic nucleic acid (BNA)
  modified_base 12: mod_base = OTHER; note = bicyclic nucleic acid (BNA)
  modified_base 18: mod_base = OTHER; note = bicyclic nucleic acid (BNA)
  source 1..18: mol_type = other RNA
ctgtccaagcccggttga

SEQ ID NO: 13108 - RNA, 18 nt, synthetic construct
  misc_feature 1..18: note = Description of Artificial Sequence: Synthetic Antisense oligonucleotide
  modified_base 1: mod_base = OTHER; note = bicyclic nucleic acid (BNA)
  modified_base 3: mod_base = OTHER; note = bicyclic nucleic acid (BNA)
  modified_base 5: mod_base = OTHER; note = bicyclic nucleic acid (BNA)
  modified_base 18: mod_base = OTHER; note = bicyclic nucleic acid (BNA)
  source 1..18: mol_type = other RNA
ctgtccaagcccggttga

SEQ ID NO: 13109 - RNA, 18 nt, synthetic construct
  misc_feature 1..18: note = Description of Artificial Sequence: Synthetic Antisense oligonucleotide
  modified_base 1: mod_base = OTHER; note = bicyclic nucleic acid (BNA)
  modified_base 10: mod_base = OTHER; note = bicyclic nucleic acid (BNA)
  modified_base 13: mod_base = OTHER; note = bicyclic nucleic acid (BNA)
  modified_base 18: mod_base = OTHER; note = bicyclic nucleic acid (BNA)
  source 1..18: mol_type = other RNA
ctgtccaagcccggttga

SEQ ID NO: 13110 - DNA, 20 bp, synthetic construct
  misc_feature 1..20: note = Description of Artificial Sequence: Synthetic Antisense oligonucleotide
  misc_feature 1..20: note = Original Sequence: tcaaggaagauggcauuuct
  modified_base 1..2: mod_base = OTHER; note = bicyclic nucleic acid (BNA)
  modified_base 20: mod_base = OTHER; note = bicyclic nucleic acid (BNA)
  source 1..20: mol_type = other DNA
  modified_base 11: mod_base = OTHER; note = Uracil
  modified_base 16: mod_base = OTHER; note = Uracil
  modified_base 17: mod_base = OTHER; note = Uracil
  modified_base 18: mod_base = OTHER; note = Uracil
tcaaggaagatggcatttct

SEQ ID NO: 13111 - DNA, 20 bp, synthetic construct
  misc_feature 1..20: note = Description of Artificial Sequence: Synthetic Antisense oligonucleotide
  misc_feature 1..20: note = Original Sequence: tcaaggaagauggcauuuct
  modified_base 1: mod_base = OTHER; note = bicyclic nucleic acid (BNA)
  modified_base 9: mod_base = OTHER; note = bicyclic nucleic acid (BNA)
  modified_base 20: mod_base = OTHER; note = bicyclic nucleic acid (BNA)
  source 1..20: mol_type = other DNA
  modified_base 11: mod_base = OTHER; note = Uracil
  modified_base 16: mod_base = OTHER; note = Uracil
  modified_base 17: mod_base = OTHER; note = Uracil
  modified_base 18: mod_base = OTHER; note = Uracil
tcaaggaagatggcatttct

SEQ ID NO: 13112 - DNA, 20 bp, synthetic construct
  misc_feature 1..20: note = Description of Artificial Sequence: Synthetic Antisense oligonucleotide
  misc_feature 1..20: note = Original Sequence: tcaaggaagauggcauuuct
  modified_base 1: mod_base = OTHER; note = bicyclic nucleic acid (BNA)
  modified_base 5: mod_base = OTHER; note = bicyclic nucleic acid (BNA)
  modified_base 20: mod_base = OTHER; note = bicyclic nucleic acid (BNA)
  source 1..20: mol_type = other DNA
  modified_base 11: mod_base = OTHER; note = Uracil
  modified_base 16: mod_base = OTHER; note = Uracil
  modified_base 17: mod_base = OTHER; note = Uracil
  modified_base 18: mod_base = OTHER; note = Uracil
tcaaggaagatggcatttct

SEQ ID NO: 13113 - DNA, 20 bp, synthetic construct
  misc_feature 1..20: note = Description of Artificial Sequence: Synthetic Antisense oligonucleotide
  misc_feature 1..20: note = Original Sequence: tcaaggaagauggcauuuct
  modified_base 1: mod_base = OTHER; note = bicyclic nucleic acid (BNA)
  modified_base 6: mod_base = OTHER; note = bicyclic nucleic acid (BNA)
  modified_base 20: mod_base = OTHER; note = bicyclic nucleic acid (BNA)
  source 1..20: mol_type = other DNA
  modified_base 11: mod_base = OTHER; note = Uracil
  modified_base 16: mod_base = OTHER; note = Uracil
  modified_base 17: mod_base = OTHER; note = Uracil
  modified_base 18: mod_base = OTHER; note = Uracil
tcaaggaagatggcatttct

SEQ ID NO: 13114 - DNA, 20 bp, synthetic construct
  misc_feature 1..20: note = Description of Artificial Sequence: Synthetic Antisense oligonucleotide
  misc_feature 1..20: note = Original Sequence: tcaaggaagauggcauuuct
  modified_base 1: mod_base = OTHER; note = bicyclic nucleic acid (BNA)
  modified_base 12: mod_base = OTHER; note = bicyclic nucleic acid (BNA)
  modified_base 20: mod_base = OTHER; note = bicyclic nucleic acid (BNA)
  source 1..20: mol_type = other DNA
  modified_base 11: mod_base = OTHER; note = Uracil
  modified_base 16: mod_base = OTHER; note = Uracil
  modified_base 17: mod_base = OTHER; note = Uracil
  modified_base 18: mod_base = OTHER; note = Uracil
tcaaggaagatggcatttct

SEQ ID NO: 13115 - DNA, 20 bp, synthetic construct
  misc_feature 1..20: note = Description of Artificial Sequence: Synthetic Antisense oligonucleotide
  misc_feature 1..20: note = Original Sequence: tcaaggaagauggcauuuct
  modified_base 1: mod_base = OTHER; note = bicyclic nucleic acid (BNA)
  modified_base 13: mod_base = OTHER; note = bicyclic nucleic acid (BNA)
  modified_base 20: mod_base = OTHER; note = bicyclic nucleic acid (BNA)
  source 1..20: mol_type = other DNA
  modified_base 11: mod_base = OTHER; note = Uracil
  modified_base 16: mod_base = OTHER; note = Uracil
  modified_base 17: mod_base = OTHER; note = Uracil
  modified_base 18: mod_base = OTHER; note = Uracil
tcaaggaagatggcatttct

SEQ ID NO: 13116 - DNA, 20 bp, synthetic construct
  misc_feature 1..20: note = Description of Artificial Sequence: Synthetic Antisense oligonucleotide
  misc_feature 1..20: note = Original Sequence: tcaaggaagauggcauuuct
  modified_base 1: mod_base = OTHER; note = bicyclic nucleic acid (BNA)
  modified_base 19..20: mod_base = OTHER; note = bicyclic nucleic acid (BNA)
  source 1..20: mol_type = other DNA
  modified_base 11: mod_base = OTHER; note = Uracil
  modified_base 16: mod_base = OTHER; note = Uracil
  modified_base 17: mod_base = OTHER; note = Uracil
  modified_base 18: mod_base = OTHER; note = Uracil
tcaaggaagatggcatttct

SEQ ID NO: 13117 - DNA, 20 bp, synthetic construct
  misc_feature 1..20: note = Description of Artificial Sequence: Synthetic Antisense oligonucleotide
  misc_feature 1..20: note = Original Sequence: tcaaggaagauggcauuuct
  modified_base 1: mod_base = OTHER; note = bicyclic nucleic acid (BNA)
  modified_base 14: mod_base = OTHER; note = bicyclic nucleic acid (BNA)
  modified_base 20: mod_base = OTHER; note = bicyclic nucleic acid (BNA)
  source 1..20: mol_type = other DNA
  modified_base 11: mod_base = OTHER; note = Uracil
  modified_base 16: mod_base = OTHER; note = Uracil
  modified_base 17: mod_base = OTHER; note = Uracil
  modified_base 18: mod_base = OTHER; note = Uracil
tcaaggaagatggcatttct

SEQ ID NO: 13118 - DNA, 22 bp, synthetic construct
  misc_feature 1..22: note = Description of Artificial Sequence: Synthetic Antisense oligonucleotide
  misc_feature 1..22: note = Original Sequence: tcaaggaagauggcauuucuag
  modified_base 1..2: mod_base = OTHER; note = bicyclic nucleic acid (BNA)
  modified_base 22: mod_base = OTHER; note = bicyclic nucleic acid (BNA)
  source 1..22: mol_type = other DNA
  modified_base 11: mod_base = OTHER; note = Uracil
  modified_base 16: mod_base = OTHER; note = Uracil
  modified_base 17: mod_base = OTHER; note = Uracil
  modified_base 18: mod_base = OTHER; note = Uracil
  modified_base 20: mod_base = OTHER; note = Uracil
tcaaggaagatggcatttctag

SEQ ID NO: 13119 - DNA, 22 bp, synthetic construct
  misc_feature 1..22: note = Description of Artificial Sequence: Synthetic Antisense oligonucleotide
  misc_feature 1..22: note = Original Sequence: tcaaggaagauggcauuucuag
  modified_base 1: mod_base = OTHER; note = bicyclic nucleic acid (BNA)
  modified_base 9: mod_base = OTHER; note = bicyclic nucleic acid (BNA)
  modified_base 22: mod_base = OTHER; note = bicyclic nucleic acid (BNA)
  source 1..22: mol_type = other DNA
  modified_base 11: mod_base = OTHER; note = Uracil
  modified_base 16: mod_base = OTHER; note = Uracil
  modified_base 17: mod_base = OTHER; note = Uracil
  modified_base 18: mod_base = OTHER; note = Uracil
  modified_base 20: mod_base = OTHER; note = Uracil
tcaaggaagatggcatttctag

SEQ ID NO: 13120 - DNA, 22 bp, synthetic construct
  misc_feature 1..22: note = Description of Artificial Sequence: Synthetic Antisense oligonucleotide
  misc_feature 1..22: note = Original Sequence: tcaaggaagauggcauuucuag
  modified_base 1: mod_base = OTHER; note = bicyclic nucleic acid (BNA)
  modified_base 5: mod_base = OTHER; note = bicyclic nucleic acid (BNA)
  modified_base 22: mod_base = OTHER; note = bicyclic nucleic acid (BNA)
  source 1..22: mol_type = other DNA
  modified_base 11: mod_base = OTHER; note = Uracil
  modified_base 16: mod_base = OTHER; note = Uracil
  modified_base 17: mod_base = OTHER; note = Uracil
  modified_base 18: mod_base = OTHER; note = Uracil
  modified_base 20: mod_base = OTHER; note = Uracil
tcaaggaagatggcatttctag

SEQ ID NO: 13121 - DNA, 22 bp, synthetic construct
  misc_feature 1..22: note = Description of Artificial Sequence: Synthetic Antisense oligonucleotide
  misc_feature 1..22: note = Original Sequence: tcaaggaagauggcauuucuag
  modified_base 1: mod_base = OTHER; note = bicyclic nucleic acid (BNA)
  modified_base 6: mod_base = OTHER; note = bicyclic nucleic acid (BNA)
  modified_base 22: mod_base = OTHER; note = bicyclic nucleic acid (BNA)
  source 1..22: mol_type = other DNA
  modified_base 11: mod_base = OTHER; note = Uracil
  modified_base 16: mod_base = OTHER; note = Uracil
  modified_base 17: mod_base = OTHER; note = Uracil
  modified_base 18: mod_base = OTHER; note = Uracil
  modified_base 20: mod_base = OTHER; note = Uracil
tcaaggaagatggcatttctag

SEQ ID NO: 13122 - DNA, 22 bp, synthetic construct
  misc_feature 1..22: note = Description of Artificial Sequence: Synthetic Antisense oligonucleotide
  misc_feature 1..22: note = Original Sequence: tcaaggaagauggcauuucuag
  modified_base 1: mod_base = OTHER; note = bicyclic nucleic acid (BNA)
  modified_base 12: mod_base = OTHER; note = bicyclic nucleic acid (BNA)
  modified_base 22: mod_base = OTHER; note = bicyclic nucleic acid (BNA)
  source 1..22: mol_type = other DNA
  modified_base 11: mod_base = OTHER; note = Uracil
  modified_base 16: mod_base = OTHER; note = Uracil
  modified_base 17: mod_base = OTHER; note = Uracil
  modified_base 18: mod_base = OTHER; note = Uracil
  modified_base 20: mod_base = OTHER; note = Uracil
tcaaggaagatggcatttctag

SEQ ID NO: 13123 - DNA, 22 bp, synthetic construct
  misc_feature 1..22: note = Description of Artificial Sequence: Synthetic Antisense oligonucleotide
  misc_feature 1..22: note = Original Sequence: tcaaggaagauggcauuucuag
  modified_base 1: mod_base = OTHER; note = bicyclic nucleic acid (BNA)
  modified_base 13: mod_base = OTHER; note = bicyclic nucleic acid (BNA)
  modified_base 22: mod_base = OTHER; note = bicyclic nucleic acid (BNA)
  source 1..22: mol_type = other DNA
  modified_base 11: mod_base = OTHER; note = Uracil
  modified_base 16: mod_base = OTHER; note = Uracil
  modified_base 17: mod_base = OTHER; note = Uracil
  modified_base 18: mod_base = OTHER; note = Uracil
  modified_base 20: mod_base = OTHER; note = Uracil
tcaaggaagatggcatttctag

SEQ ID NO: 13124 - DNA, 22 bp, synthetic construct
  misc_feature 1..22: note = Description of Artificial Sequence: Synthetic Antisense oligonucleotide
  misc_feature 1..22: note = Original Sequence: tcaaggaagauggcauuucuag
  modified_base 1: mod_base = OTHER; note = bicyclic nucleic acid (BNA)
  modified_base 19: mod_base = OTHER; note = bicyclic nucleic acid (BNA)
  modified_base 22: mod_base = OTHER; note = bicyclic nucleic acid (BNA)
  source 1..22: mol_type = other DNA
  modified_base 11: mod_base = OTHER; note = Uracil
  modified_base 16: mod_base = OTHER; note = Uracil
  modified_base 17: mod_base = OTHER; note = Uracil
  modified_base 18: mod_base = OTHER; note = Uracil
  modified_base 20: mod_base = OTHER; note = Uracil
tcaaggaagatggcatttctag

SEQ ID NO: 13125 - DNA, 22 bp, synthetic construct
  misc_feature 1..22: note = Description of Artificial Sequence: Synthetic Antisense oligonucleotide
  misc_feature 1..22: note = Original Sequence: tcaaggaagauggcauuucuag
  modified_base 1: mod_base = OTHER; note = bicyclic nucleic acid (BNA)
  modified_base 14: mod_base = OTHER; note = bicyclic nucleic acid (BNA)
  modified_base 22: mod_base = OTHER; note = bicyclic nucleic acid (BNA)
  source 1..22: mol_type = other DNA
  modified_base 11: mod_base = OTHER; note = Uracil
  modified_base 16: mod_base = OTHER; note = Uracil
  modified_base 17: mod_base = OTHER; note = Uracil
  modified_base 18: mod_base = OTHER; note = Uracil
  modified_base 20: mod_base = OTHER; note = Uracil
tcaaggaagatggcatttctag

SEQ ID NO: 13126 - DNA, 20 bp, synthetic construct
  misc_feature 1..20: note = Description of Artificial Sequence: Synthetic Antisense oligonucleotide
  misc_feature 1..20: note = Original Sequence: tcaaggaagauggcauuuct
  modified_base 1: mod_base = OTHER; note = bicyclic nucleic acid (BNA)
  modified_base 9: mod_base = OTHER; note = bicyclic nucleic acid (BNA)
  modified_base 14: mod_base = OTHER; note = bicyclic nucleic acid (BNA)
  modified_base 20: mod_base = OTHER; note = bicyclic nucleic acid (BNA)
  source 1..20: mol_type = other DNA
  modified_base 11: mod_base = OTHER; note = Uracil
  modified_base 16: mod_base = OTHER; note = Uracil
  modified_base 17: mod_base = OTHER; note = Uracil
  modified_base 18: mod_base = OTHER; note = Uracil
tcaaggaagatggcatttct

SEQ ID NO: 13127 - DNA, 20 bp, synthetic construct
  misc_feature 1..20: note = Description of Artificial Sequence: Synthetic Antisense oligonucleotide
  misc_feature 1..20: note = Original Sequence: tcaaggaagauggcauuuct
  modified_base 1: mod_base = OTHER; note = bicyclic nucleic acid (BNA)
  modified_base 5: mod_base = OTHER; note = bicyclic nucleic acid (BNA)
  modified_base 9: mod_base = OTHER; note = bicyclic nucleic acid (BNA)
  modified_base 20: mod_base = OTHER; note = bicyclic nucleic acid (BNA)
  source 1..20: mol_type = other DNA
  modified_base 11: mod_base = OTHER; note = Uracil
  modified_base 16: mod_base = OTHER; note = Uracil
  modified_base 17: mod_base = OTHER; note = Uracil
  modified_base 18: mod_base = OTHER; note = Uracil
tcaaggaagatggcatttct

SEQ ID NO: 13128 - DNA, 20 bp, synthetic construct
  misc_feature 1..20: note = Description of Artificial Sequence: Synthetic Antisense oligonucleotide
  misc_feature 1..20: note = Original Sequence: tcaaggaagauggcauuuct
  modified_base 1: mod_base = OTHER; note = bicyclic nucleic acid (BNA)
  modified_base 5: mod_base = OTHER; note = bicyclic nucleic acid (BNA)
  modified_base 19..20: mod_base = OTHER; note = bicyclic nucleic acid (BNA)
  source 1..20: mol_type = other DNA
  modified_base 11: mod_base = OTHER; note = Uracil
  modified_base 16: mod_base = OTHER; note = Uracil
  modified_base 17: mod_base = OTHER; note = Uracil
  modified_base 18: mod_base = OTHER; note = Uracil
tcaaggaagatggcatttct

SEQ ID NO: 13129 - DNA, 20 bp, synthetic construct
  misc_feature 1..20: note = Description of Artificial Sequence: Synthetic Antisense oligonucleotide
  misc_feature 1..20: note = Original Sequence: tcaaggaagauggcauuuct
  modified_base 1: mod_base = OTHER; note = bicyclic nucleic acid (BNA)
  modified_base 6: mod_base = OTHER; note = bicyclic nucleic acid (BNA)
  modified_base 14: mod_base = OTHER; note = bicyclic nucleic acid (BNA)
  modified_base 20: mod_base = OTHER; note = bicyclic nucleic acid (BNA)
  source 1..20: mol_type = other DNA
  modified_base 11: mod_base = OTHER; note = Uracil
  modified_base 16: mod_base = OTHER; note = Uracil
  modified_base 17: mod_base = OTHER; note = Uracil
  modified_base 18: mod_base = OTHER; note = Uracil
tcaaggaagatggcatttct

SEQ ID NO: 13130 - DNA, 20 bp, synthetic construct
  misc_feature 1..20: note = Description of Artificial Sequence: Synthetic Antisense oligonucleotide
  misc_feature 1..20: note = Original Sequence: tcaaggaagauggcauuuct
  modified_base 1: mod_base = OTHER; note = bicyclic nucleic acid (BNA)
  modified_base 5: mod_base = OTHER; note = bicyclic nucleic acid (BNA)
  modified_base 13: mod_base = OTHER; note = bicyclic nucleic acid (BNA)
  modified_base 20: mod_base = OTHER; note = bicyclic nucleic acid (BNA)
  source 1..20: mol_type = other DNA
  modified_base 11: mod_base = OTHER; note = Uracil
  modified_base 16: mod_base = OTHER; note = Uracil
  modified_base 17: mod_base = OTHER; note = Uracil
  modified_base 18: mod_base = OTHER; note = Uracil
tcaaggaagatggcatttct

SEQ ID NO: 13131 - DNA, 20 bp, synthetic construct
  misc_feature 1..20: note = Description of Artificial Sequence: Synthetic Antisense oligonucleotide
  misc_feature 1..20: note = Original Sequence: tcaaggaagauggcauuuct
  modified_base 1..2: mod_base = OTHER; note = bicyclic nucleic acid (BNA)
  modified_base 12: mod_base = OTHER; note = bicyclic nucleic acid (BNA)
  modified_base 20: mod_base = OTHER; note = bicyclic nucleic acid (BNA)
  source 1..20: mol_type = other DNA
  modified_base 11: mod_base = OTHER; note = Uracil
  modified_base 16: mod_base = OTHER; note = Uracil
  modified_base 17: mod_base = OTHER; note = Uracil
  modified_base 18: mod_base = OTHER; note = Uracil
tcaaggaagatggcatttct

SEQ ID NO: 13132 - DNA, 20 bp, synthetic construct
  misc_feature 1..20: note = Description of Artificial Sequence: Synthetic Antisense oligonucleotide
  misc_feature 1..20: note = Original Sequence: tcaaggaagauggcauuuct
  modified_base 1: mod_base = OTHER; note = bicyclic nucleic acid (BNA)
  modified_base 6: mod_base = OTHER; note = bicyclic nucleic acid (BNA)
  modified_base 9: mod_base = OTHER; note = bicyclic nucleic acid (BNA)
  modified_base 20: mod_base = OTHER; note = bicyclic nucleic acid (BNA)
  source 1..20: mol_type = other DNA
  modified_base 11: mod_base = OTHER; note = Uracil
  modified_base 16: mod_base = OTHER; note = Uracil
  modified_base 17: mod_base = OTHER; note = Uracil
  modified_base 18: mod_base = OTHER; note = Uracil
tcaaggaagatggcatttct

SEQ ID NO: 13133 - DNA, 20 bp, synthetic construct
  misc_feature 1..20: note = Description of Artificial Sequence: Synthetic Antisense oligonucleotide
  misc_feature 1..20: note = Original Sequence: tcaaggaagauggcauuuct
  modified_base 1: mod_base = OTHER; note = bicyclic nucleic acid (BNA)
  modified_base 13..14: mod_base = OTHER; note = bicyclic nucleic acid (BNA)
  modified_base 20: mod_base = OTHER; note = bicyclic nucleic acid (BNA)
  source 1..20: mol_type = other DNA
  modified_base 11: mod_base = OTHER; note = Uracil
  modified_base 16: mod_base = OTHER; note = Uracil
  modified_base 17: mod_base = OTHER; note = Uracil
  modified_base 18: mod_base = OTHER; note = Uracil
tcaaggaagatggcatttct

SEQ ID NO: 13134 - DNA, 20 bp, synthetic construct
  misc_feature 1..20: note = Description of Artificial Sequence: Synthetic Antisense oligonucleotide
  misc_feature 1..20: note = Original Sequence: tcaaggaagauggcauuuct
  modified_base 1: mod_base = OTHER; note = bicyclic nucleic acid (BNA)
  modified_base 6: mod_base = OTHER; note = bicyclic nucleic acid (BNA)
  modified_base 13: mod_base = OTHER; note = bicyclic nucleic acid (BNA)
  modified_base 20: mod_base = OTHER; note = bicyclic nucleic acid (BNA)
  source 1..20: mol_type = other DNA
  modified_base 11: mod_base = OTHER; note = Uracil
  modified_base 16: mod_base = OTHER; note = Uracil
  modified_base 17: mod_base = OTHER; note = Uracil
  modified_base 18: mod_base = OTHER; note = Uracil
tcaaggaagatggcatttct

SEQ ID NO: 13135 - DNA, 20 bp, synthetic construct
  misc_feature 1..20: note = Description of Artificial Sequence: Synthetic Antisense oligonucleotide
  misc_feature 1..20: note = Original Sequence: tcaaggaagauggcauuuct
  modified_base 1: mod_base = OTHER; note = bicyclic nucleic acid (BNA)
  modified_base 6: mod_base = OTHER; note = bicyclic nucleic acid (BNA)
  modified_base 19..20: mod_base = OTHER; note = bicyclic nucleic acid (BNA)
  source 1..20: mol_type = other DNA
  modified_base 11: mod_base = OTHER; note = Uracil
  modified_base 16: mod_base = OTHER; note = Uracil
  modified_base 17: mod_base = OTHER; note = Uracil
  modified_base 18: mod_base = OTHER; note = Uracil
tcaaggaagatggcatttct

SEQ ID NO: 13136 - DNA, 20 bp, synthetic construct
  misc_feature 1..20: note = Description of Artificial Sequence: Synthetic Antisense oligonucleotide
  misc_feature 1..20: note = Original Sequence: tcaaggaagauggcauuuct
  modified_base 1: mod_base = OTHER; note = bicyclic nucleic acid (BNA)
  modified_base 5: mod_base = OTHER; note = bicyclic nucleic acid (BNA)
  modified_base 14: mod_base = OTHER; note = bicyclic nucleic acid (BNA)
  modified_base 20: mod_base = OTHER; note = bicyclic nucleic acid (BNA)
  source 1..20: mol_type = other DNA
  modified_base 11: mod_base = OTHER; note = Uracil
  modified_base 16: mod_base = OTHER; note = Uracil
  modified_base 17: mod_base = OTHER; note = Uracil
  modified_base 18: mod_base = OTHER; note = Uracil
tcaaggaagatggcatttct

SEQ ID NO: 13137 - DNA, 20 bp, synthetic construct
  misc_feature 1..20: note = Description of Artificial Sequence: Synthetic Antisense oligonucleotide
  misc_feature 1..20: note = Original Sequence: tcaaggaagauggcauuuct
  modified_base 1..2: mod_base = OTHER; note = bicyclic nucleic acid (BNA)
  modified_base 6: mod_base = OTHER; note = bicyclic nucleic acid (BNA)
  modified_base 20: mod_base = OTHER; note = bicyclic nucleic acid (BNA)
  source 1..20: mol_type = other DNA
  modified_base 11: mod_base = OTHER; note = Uracil
  modified_base 16: mod_base = OTHER; note = Uracil
  modified_base 17: mod_base = OTHER; note = Uracil
  modified_base 18: mod_base = OTHER; note = Uracil
tcaaggaagatggcatttct

SEQ ID NO: 13138 - DNA, 20 bp, synthetic construct
  misc_feature 1..20: note = Description of Artificial Sequence: Synthetic Antisense oligonucleotide
  misc_feature 1..20: note = Original Sequence: tcaaggaagauggcauuuct
  modified_base 1: mod_base = OTHER; note = bicyclic nucleic acid (BNA)
  modified_base 12: mod_base = OTHER; note = bicyclic nucleic acid (BNA)
  modified_base 19..20: mod_base = OTHER; note = bicyclic nucleic acid (BNA)
  source 1..20: mol_type = other DNA
  modified_base 11: mod_base = OTHER; note = Uracil
  modified_base 16: mod_base = OTHER; note = Uracil
  modified_base 17: mod_base = OTHER; note = Uracil
  modified_base 18: mod_base = OTHER; note = Uracil
tcaaggaagatggcatttct

SEQ ID NO: 13139 - DNA, 20 bp, synthetic construct
  misc_feature 1..20: note = Description of Artificial Sequence: Synthetic Antisense oligonucleotide
  misc_feature 1..20: note = Original Sequence: tcaaggaagauggcauuuct
  modified_base 1: mod_base = OTHER; note = bicyclic nucleic acid (BNA)
  modified_base 12: mod_base = OTHER; note = bicyclic nucleic acid (BNA)
  modified_base 14: mod_base = OTHER; note = bicyclic nucleic acid (BNA)
  modified_base 20: mod_base = OTHER; note = bicyclic nucleic acid (BNA)
  source 1..20: mol_type = other DNA
  modified_base 11: mod_base = OTHER; note = Uracil
  modified_base 16: mod_base = OTHER; note = Uracil
  modified_base 17: mod_base = OTHER; note = Uracil
  modified_base 18: mod_base = OTHER; note = Uracil
tcaaggaagatggcatttct

SEQ ID NO: 13140 - DNA, 20 bp, synthetic construct
  misc_feature 1..20: note = Description of Artificial Sequence: Synthetic Antisense oligonucleotide
  misc_feature 1..20: note = Original Sequence: tcaaggaagauggcauuuct
  modified_base 1: mod_base = OTHER; note = bicyclic nucleic acid (BNA)
  modified_base 6: mod_base = OTHER; note = bicyclic nucleic acid (BNA)
  modified_base 12: mod_base = OTHER; note = bicyclic nucleic acid (BNA)
  modified_base 20: mod_base = OTHER; note = bicyclic nucleic acid (BNA)
  source 1..20: mol_type = other DNA
  modified_base 11: mod_base = OTHER; note = Uracil
  modified_base 16: mod_base = OTHER; note = Uracil
  modified_base 17: mod_base = OTHER; note = Uracil
  modified_base 18: mod_base = OTHER; note = Uracil
tcaaggaagatggcatttct

SEQ ID NO: 13141 - DNA, 20 bp, synthetic construct
  misc_feature 1..20: note = Description of Artificial Sequence: Synthetic Antisense oligonucleotide
  misc_feature 1..20: note = Original Sequence: tcaaggaagauggcauuuct
  modified_base 1: mod_base = OTHER; note = bicyclic nucleic acid (BNA)
  modified_base 5..6: mod_base = OTHER; note = bicyclic nucleic acid (BNA)
  modified_base 20: mod_base = OTHER; note = bicyclic nucleic acid (BNA)
  source 1..20: mol_type = other DNA
  modified_base 11: mod_base = OTHER; note = Uracil
  modified_base 16: mod_base = OTHER; note = Uracil
  modified_base 17: mod_base = OTHER; note = Uracil
  modified_base 18: mod_base = OTHER; note = Uracil
tcaaggaagatggcatttct

SEQ ID NO: 13142 - DNA, 20 bp, synthetic construct
  misc_feature 1..20: note = Description of Artificial Sequence: Synthetic Antisense oligonucleotide
  misc_feature 1..20: note = Original Sequence: tcaaggaagauggcauuuct
  modified_base 1..2: mod_base = OTHER; note = bicyclic nucleic acid (BNA)
  modified_base 14: mod_base = OTHER; note = bicyclic nucleic acid (BNA)
  modified_base 20: mod_base = OTHER; note = bicyclic nucleic acid (BNA)
  source 1..20: mol_type = other DNA
  modified_base 11: mod_base = OTHER; note = Uracil
  modified_base 16: mod_base = OTHER; note = Uracil
  modified_base 17: mod_base = OTHER; note = Uracil
  modified_base 18: mod_base = OTHER; note = Uracil
tcaaggaagatggcatttct

SEQ ID NO: 13143 - DNA, 20 bp, synthetic construct
  misc_feature 1..20: note = Description of Artificial Sequence: Synthetic Antisense oligonucleotide
  misc_feature 1..20: note = Original Sequence: tcaaggaagauggcauuuct
  modified_base 1: mod_base = OTHER; note = bicyclic nucleic acid (BNA)
  modified_base 9: mod_base = OTHER; note = bicyclic nucleic acid (BNA)
  modified_base 12: mod_base = OTHER; note = bicyclic nucleic acid (BNA)
  modified_base 20: mod_base = OTHER; note = bicyclic nucleic acid (BNA)
  source 1..20: mol_type = other DNA
  modified_base 11: mod_base = OTHER; note = Uracil
  modified_base 16: mod_base = OTHER; note = Uracil
  modified_base 17: mod_base = OTHER; note = Uracil
  modified_base 18: mod_base = OTHER; note = Uracil
tcaaggaagatggcatttct

SEQ ID NO: 13144 - DNA, 20 bp, synthetic construct
  misc_feature 1..20: note = Description of Artificial Sequence: Synthetic Antisense oligonucleotide
  misc_feature 1..20: note = Original Sequence: tcaaggaagauggcauuuct
  modified_base 1..2: mod_base = OTHER; note = bicyclic nucleic acid (BNA)
  modified_base 5: mod_base = OTHER; note = bicyclic nucleic acid (BNA)
  modified_base 20: mod_base = OTHER; note = bicyclic nucleic acid (BNA)
  source 1..20: mol_type = other DNA
  modified_base 11: mod_base = OTHER; note = Uracil
  modified_base 16: mod_base = OTHER; note = Uracil
  modified_base 17: mod_base = OTHER; note = Uracil
  modified_base 18: mod_base = OTHER; note = Uracil
tcaaggaagatggcatttct

SEQ ID NO: 13145 - DNA, 20 bp, synthetic construct
  misc_feature 1..20: note = Description of Artificial Sequence: Synthetic Antisense oligonucleotide
  misc_feature 1..20: note = Original Sequence: tcaaggaagauggcauuuct
  modified_base 1: mod_base = OTHER; note = bicyclic nucleic acid (BNA)
  modified_base 13: mod_base = OTHER; note = bicyclic nucleic acid (BNA)
  modified_base 19..20: mod_base = OTHER; note = bicyclic nucleic acid (BNA)
  source 1..20: mol_type = other DNA
  modified_base 11: mod_base = OTHER; note = Uracil
  modified_base 16: mod_base = OTHER; note = Uracil
  modified_base 17: mod_base = OTHER; note = Uracil
  modified_base 18: mod_base = OTHER; note = Uracil
tcaaggaagatggcatttct

SEQ ID NO: 13146 - DNA, 20 bp, synthetic construct
  misc_feature 1..20: note = Description of Artificial Sequence: Synthetic Antisense oligonucleotide
  misc_feature 1..20: note = Original Sequence: tcaaggaagauggcauuuct
  modified_base 1: mod_base = OTHER; note = bicyclic nucleic acid (BNA)
  modified_base 12..13: mod_base = OTHER; note = bicyclic nucleic acid (BNA)
  modified_base 20: mod_base = OTHER; note = bicyclic nucleic acid (BNA)
  source 1..20: mol_type = other DNA
  modified_base 11: mod_base = OTHER; note = Uracil
  modified_base 16: mod_base = OTHER; note = Uracil
  modified_base 17: mod_base = OTHER; note = Uracil
  modified_base 18: mod_base = OTHER; note = Uracil
tcaaggaagatggcatttct

SEQ ID NO: 13147 - DNA, 20 bp, synthetic construct
  misc_feature 1..20: note = Description of Artificial Sequence: Synthetic Antisense oligonucleotide
  misc_feature 1..20: note = Original Sequence: tcaaggaagauggcauuuct
  modified_base 1: mod_base = OTHER; note = bicyclic nucleic acid (BNA)
  modified_base 5: mod_base = OTHER; note = bicyclic nucleic acid (BNA)
  modified_base 12: mod_base = OTHER; note = bicyclic nucleic acid (BNA)
  modified_base 20: mod_base = OTHER; note = bicyclic nucleic acid (BNA)
  source 1..20: mol_type = other DNA
  modified_base 11: mod_base = OTHER; note = Uracil
  modified_base 16: mod_base = OTHER; note = Uracil
  modified_base 17: mod_base = OTHER; note = Uracil
  modified_base 18: mod_base = OTHER; note = Uracil
tcaaggaagatggcatttct

SEQ ID NO: 13148 - DNA, 20 bp, synthetic construct
  misc_feature 1..20: note = Description of Artificial Sequence: Synthetic Antisense oligonucleotide
  misc_feature 1..20: note = Original Sequence: tcaaggaagauggcauuuct
  modified_base 1..2: mod_base = OTHER; note = bicyclic nucleic acid (BNA)
  modified_base 13: mod_base = OTHER; note = bicyclic nucleic acid (BNA)
  modified_base 20: mod_base = OTHER; note = bicyclic nucleic acid (BNA)
  source 1..20: mol_type = other DNA
  modified_base 11: mod_base = OTHER; note = Uracil
  modified_base 16: mod_base = OTHER; note = Uracil
  modified_base 17: mod_base = OTHER; note = Uracil
  modified_base 18: mod_base = OTHER; note = Uracil
tcaaggaagatggcatttct

SEQ ID NO: 13149 - DNA, 20 bp, synthetic construct
  misc_feature 1..20: note = Description of Artificial Sequence: Synthetic Antisense oligonucleotide
  misc_feature 1..20: note = Original Sequence: tcaaggaagauggcauuuct
  modified_base 1: mod_base = OTHER; note = bicyclic nucleic acid (BNA)
  modified_base 9: mod_base = OTHER; note = bicyclic nucleic acid (BNA)
  modified_base 13: mod_base = OTHER; note = bicyclic nucleic acid (BNA)
  modified_base 20: mod_base = OTHER; note = bicyclic nucleic acid (BNA)
  source 1..20: mol_type = other DNA
  modified_base 11: mod_base = OTHER; note = Uracil
  modified_base 16: mod_base = OTHER; note = Uracil
  modified_base 17: mod_base = OTHER; note = Uracil
  modified_base 18: mod_base = OTHER; note = Uracil
tcaaggaagatggcatttct

SEQ ID NO: 13150 - DNA, 20 bp, synthetic construct
  misc_feature 1..20: note = Description of Artificial Sequence: Synthetic Antisense oligonucleotide
  misc_feature 1..20: note = Original Sequence: tcaaggaagauggcauuuct
  modified_base 1..2: mod_base = OTHER; note = bicyclic nucleic acid (BNA)
  modified_base 19..20: mod_base = OTHER; note = bicyclic nucleic acid (BNA)
  source 1..20: mol_type = other DNA
  modified_base 11: mod_base = OTHER; note = Uracil
  modified_base 16: mod_base = OTHER; note = Uracil
  modified_base 17: mod_base = OTHER; note = Uracil
  modified_base 18: mod_base = OTHER; note = Uracil
tcaaggaagatggcatttct

SEQ ID NO: 13151 - DNA, 20 bp, synthetic construct
  misc_feature 1..20: note = Description of Artificial Sequence: Synthetic Antisense oligonucleotide
  misc_feature 1..20: note = Original Sequence: tcaaggaagauggcauuuct
  modified_base 1..2: mod_base = OTHER; note = bicyclic nucleic acid (BNA)
  modified_base 9: mod_base = OTHER; note = bicyclic nucleic acid (BNA)
  modified_base 20: mod_base = OTHER; note = bicyclic nucleic acid (BNA)
  source 1..20: mol_type = other DNA
  modified_base 11: mod_base = OTHER; note = Uracil
  modified_base 16: mod_base = OTHER; note = Uracil
  modified_base 17: mod_base = OTHER; note = Uracil
  modified_base 18: mod_base = OTHER; note = Uracil
tcaaggaagatggcatttct

SEQ ID NO: 13152 - DNA, 20 bp, synthetic construct
  misc_feature 1..20: note = Description of Artificial Sequence: Synthetic Antisense oligonucleotide
  misc_feature 1..20: note = Original Sequence: tcaaggaagauggcauuuct
  modified_base 1: mod_base = OTHER; note = bicyclic nucleic acid (BNA)
  modified_base 14: mod_base = OTHER; note = bicyclic nucleic acid (BNA)
  modified_base 19..20: mod_base = OTHER; note = bicyclic nucleic acid (BNA)
  source 1..20: mol_type = other DNA
  modified_base 11: mod_base = OTHER; note = Uracil
  modified_base 16: mod_base = OTHER; note = Uracil
  modified_base 17: mod_base = OTHER; note = Uracil
  modified_base 18: mod_base = OTHER; note = Uracil
tcaaggaagatggcatttct

SEQ ID NO: 13153 - DNA, 20 bp, synthetic construct
  misc_feature 1..20: note = Description of Artificial Sequence: Synthetic Antisense oligonucleotide
  misc_feature 1..20: note = Original Sequence: tcaaggaagauggcauuuct
  modified_base 1: mod_base = OTHER; note = bicyclic nucleic acid (BNA)
  modified_base 9: mod_base = OTHER; note = bicyclic nucleic acid (BNA)
  modified_base 19..20: mod_base = OTHER; note = bicyclic nucleic acid (BNA)
  source 1..20: mol_type = other DNA
  modified_base 11: mod_base = OTHER; note = Uracil
  modified_base 16: mod_base = OTHER; note = Uracil
  modified_base 17: mod_base = OTHER; note = Uracil
  modified_base 18: mod_base = OTHER; note = Uracil
tcaaggaagatggcatttct

SEQ ID NO: 13154 - DNA, 22 bp, synthetic construct
  misc_feature 1..22: note = Description of Artificial Sequence: Synthetic Antisense oligonucleotide
  misc_feature 1..22: note = Original Sequence: tcaaggaagauggcauuucuag
  modified_base 1: mod_base = OTHER; note = bicyclic nucleic acid (BNA)
  modified_base 9: mod_base = OTHER; note = bicyclic nucleic acid (BNA)
  modified_base 14: mod_base = OTHER; note = bicyclic nucleic acid (BNA)
  modified_base 22: mod_base = OTHER; note = bicyclic nucleic acid (BNA)
  source 1..22: mol_type = other DNA
  modified_base 11: mod_base = OTHER; note = Uracil
  modified_base 16: mod_base = OTHER; note = Uracil
  modified_base 17: mod_base = OTHER; note = Uracil
  modified_base 18: mod_base = OTHER; note = Uracil
  modified_base 20: mod_base = OTHER; note = Uracil
tcaaggaagatggcatttctag

SEQ ID NO: 13155 - DNA, 22 bp, synthetic construct
  misc_feature 1..22: note = Description of Artificial Sequence: Synthetic Antisense oligonucleotide
  misc_feature 1..22: note = Original Sequence: tcaaggaagauggcauuucuag
  modified_base 1: mod_base = OTHER; note = bicyclic nucleic acid (BNA)
  modified_base 5: mod_base = OTHER; note = bicyclic nucleic acid (BNA)
  modified_base 9: mod_base = OTHER; note = bicyclic nucleic acid (BNA)
  modified_base 22: mod_base = OTHER; note = bicyclic nucleic acid (BNA)
  source 1..22: mol_type = other DNA
  modified_base 11: mod_base = OTHER; note = Uracil
  modified_base 16: mod_base = OTHER; note = Uracil
  modified_base 17: mod_base = OTHER; note = Uracil
  modified_base 18: mod_base = OTHER; note = Uracil
  modified_base 20: mod_base = OTHER; note = Uracil
tcaaggaagatggcatttctag

SEQ ID NO: 13156 - DNA, 22 bp, synthetic construct
  misc_feature 1..22: note = Description of Artificial Sequence: Synthetic Antisense oligonucleotide
  misc_feature 1..22: note = Original Sequence: tcaaggaagauggcauuucuag
  modified_base 1: mod_base = OTHER; note = bicyclic nucleic acid (BNA)
  modified_base 5: mod_base = OTHER; note = bicyclic nucleic acid (BNA)
  modified_base 19: mod_base = OTHER; note = bicyclic nucleic acid (BNA)
  modified_base 22: mod_base = OTHER; note = bicyclic nucleic acid (BNA)
  source 1..22: mol_type = other DNA
  modified_base 11: mod_base = OTHER; note = Uracil
  modified_base 16: mod_base = OTHER; note = Uracil
  modified_base 17: mod_base = OTHER; note = Uracil
  modified_base 18: mod_base = OTHER; note = Uracil
  modified_base 20: mod_base = OTHER; note = Uracil
tcaaggaagatggcatttctag

SEQ ID NO: 13157 - DNA, 22 bp, synthetic construct
  misc_feature 1..22: note = Description of Artificial Sequence: Synthetic Antisense oligonucleotide
  misc_feature 1..22: note = Original Sequence: tcaaggaagauggcauuucuag
  modified_base 1: mod_base = OTHER; note = bicyclic nucleic acid (BNA)
  modified_base 6: mod_base = OTHER; note = bicyclic nucleic acid (BNA)
  modified_base 14: mod_base = OTHER; note = bicyclic nucleic acid (BNA)
  modified_base 22: mod_base = OTHER; note = bicyclic nucleic acid (BNA)
  source 1..22: mol_type = other DNA
  modified_base 11: mod_base = OTHER; note = Uracil
  modified_base 16: mod_base = OTHER; note = Uracil
  modified_base 17: mod_base = OTHER; note = Uracil
  modified_base 18: mod_base = OTHER; note = Uracil
  modified_base 20: mod_base = OTHER; note = Uracil
tcaaggaagatggcatttctag

SEQ ID NO: 13158 - DNA, 22 bp, synthetic construct
  misc_feature 1..22: note = Description of Artificial Sequence: Synthetic Antisense oligonucleotide
  misc_feature 1..22: note = Original Sequence: tcaaggaagauggcauuucuag
  modified_base 1: mod_base = OTHER; note = bicyclic nucleic acid (BNA)
  modified_base 5: mod_base = OTHER; note = bicyclic nucleic acid (BNA)
  modified_base 13: mod_base = OTHER; note = bicyclic nucleic acid (BNA)
  modified_base 22: mod_base = OTHER; note = bicyclic nucleic acid (BNA)
  source 1..22: mol_type = other DNA
  modified_base 11: mod_base = OTHER; note = Uracil
  modified_base 16: mod_base = OTHER; note = Uracil
  modified_base 17: mod_base = OTHER; note = Uracil
  modified_base 18: mod_base = OTHER; note = Uracil
  modified_base 20: mod_base = OTHER; note = Uracil
tcaaggaagatggcatttctag

SEQ ID NO: 13159 - DNA, 22 bp, synthetic construct
  misc_feature 1..22: note = Description of Artificial Sequence: Synthetic Antisense oligonucleotide
  misc_feature 1..22: note = Original Sequence: tcaaggaagauggcauuucuag
  modified_base 1..2: mod_base = OTHER; note = bicyclic nucleic acid (BNA)
  modified_base 12: mod_base = OTHER; note = bicyclic nucleic acid (BNA)
  modified_base 22: mod_base = OTHER; note = bicyclic nucleic acid (BNA)
  source 1..22: mol_type = other DNA
  modified_base 11: mod_base = OTHER; note = Uracil
  modified_base 16: mod_base = OTHER; note = Uracil
  modified_base 17: mod_base = OTHER; note = Uracil
  modified_base 18: mod_base = OTHER; note = Uracil
  modified_base 20: mod_base = OTHER; note = Uracil
tcaaggaagatggcatttctag

SEQ ID NO: 13160 - DNA, 22 bp, synthetic construct
  misc_feature 1..22: note = Description of Artificial Sequence: Synthetic Antisense oligonucleotide
  misc_feature 1..22: note = Original Sequence: tcaaggaagauggcauuucuag
  modified_base 1: mod_base = OTHER; note = bicyclic nucleic acid (BNA)
  modified_base 6: mod_base = OTHER; note = bicyclic nucleic acid (BNA)
  modified_base 9: mod_base = OTHER; note = bicyclic nucleic acid (BNA)
  modified_base 22: mod_base = OTHER; note = bicyclic nucleic acid (BNA)
  source 1..22: mol_type = other DNA
  modified_base 11: mod_base = OTHER; note = Uracil
  modified_base 16: mod_base = OTHER; note = Uracil
  modified_base 17: mod_base = OTHER; note = Uracil
  modified_base 18: mod_base = OTHER; note = Uracil
  modified_base 20: mod_base = OTHER; note = Uracil
tcaaggaagatggcatttctag

SEQ ID NO: 13161 - DNA, 22 bp, synthetic construct
  misc_feature 1..22: note = Description of Artificial Sequence: Synthetic Antisense oligonucleotide
  misc_feature 1..22: note = Original Sequence: tcaaggaagauggcauuucuag
  modified_base 1: mod_base = OTHER; note = bicyclic nucleic acid (BNA)
  modified_base 13..14: mod_base = OTHER; note = bicyclic nucleic acid (BNA)
  modified_base 22: mod_base = OTHER; note = bicyclic nucleic acid (BNA)
  source 1..22: mol_type = other DNA
  modified_base 11: mod_base = OTHER; note = Uracil
  modified_base 16: mod_base = OTHER; note = Uracil
  modified_base 17: mod_base = OTHER; note = Uracil
  modified_base 18: mod_base = OTHER; note = Uracil
  modified_base 20: mod_base = OTHER; note = Uracil
tcaaggaagatggcatttctag

SEQ ID NO: 13162 - DNA, 22 bp, synthetic construct
  misc_feature 1..22: note = Description of Artificial Sequence: Synthetic Antisense oligonucleotide
  misc_feature 1..22: note = Original Sequence: tcaaggaagauggcauuucuag
  modified_base 1: mod_base = OTHER; note = bicyclic nucleic acid (BNA)
  modified_base 6: mod_base = OTHER; note = bicyclic nucleic acid (BNA)
  modified_base 13: mod_base = OTHER; note = bicyclic nucleic acid (BNA)
  modified_base 22: mod_base = OTHER; note = bicyclic nucleic acid (BNA)
  source 1..22: mol_type = other DNA
  modified_base 11: mod_base = OTHER; note = Uracil
  modified_base 16: mod_base = OTHER; note = Uracil
  modified_base 17: mod_base = OTHER; note = Uracil
  modified_base 18: mod_base = OTHER; note = Uracil
  modified_base 20: mod_base = OTHER; note = Uracil
tcaaggaagatggcatttctag

SEQ ID NO: 13163 - DNA, 22 bp, synthetic construct
  misc_feature 1..22: note = Description of Artificial Sequence: Synthetic Antisense oligonucleotide
  misc_feature 1..22: note = Original Sequence: tcaaggaagauggcauuucuag
  modified_base 1: mod_base = OTHER; note = bicyclic nucleic acid (BNA)
  modified_base 6: mod_base = OTHER; note = bicyclic nucleic acid (BNA)
  modified_base 19: mod_base = OTHER; note = bicyclic nucleic acid (BNA)
  modified_base 22: mod_base = OTHER; note = bicyclic nucleic acid (BNA)
  source 1..22: mol_type = other DNA
  modified_base 11: mod_base = OTHER; note = Uracil
  modified_base 16: mod_base = OTHER; note = Uracil
  modified_base 17: mod_base = OTHER; note = Uracil
  modified_base 18: mod_base = OTHER; note = Uracil
  modified_base 20: mod_base = OTHER; note = Uracil
tcaaggaagatggcatttctag

SEQ ID NO: 13164 - DNA, 22 bp, synthetic construct
  misc_feature 1..22: note = Description of Artificial Sequence: Synthetic Antisense oligonucleotide
  misc_feature 1..22: note = Original Sequence: tcaaggaagauggcauuucuag
  modified_base 1: mod_base = OTHER; note = bicyclic nucleic acid (BNA)
  modified_base 5: mod_base = OTHER; note = bicyclic nucleic acid (BNA)
  modified_base 14: mod_base = OTHER; note = bicyclic nucleic acid (BNA)
  modified_base 22: mod_base = OTHER; note = bicyclic nucleic acid (BNA)
  source 1..22: mol_type = other DNA
  modified_base 11: mod_base = OTHER; note = Uracil
  modified_base 16: mod_base = OTHER; note = Uracil
  modified_base 17: mod_base = OTHER; note = Uracil
  modified_base 18: mod_base = OTHER; note = Uracil
  modified_base 20: mod_base = OTHER; note = Uracil
tcaaggaagatggcatttctag

SEQ ID NO: 13165 - DNA, 22 bp, synthetic construct
  misc_feature 1..22: note = Description of Artificial Sequence: Synthetic Antisense oligonucleotide
  misc_feature 1..22: note = Original Sequence: tcaaggaagauggcauuucuag
  modified_base 1..2: mod_base = OTHER; note = bicyclic nucleic acid (BNA)
  modified_base 6: mod_base = OTHER; note = bicyclic nucleic acid (BNA)
  modified_base 22: mod_base = OTHER; note = bicyclic nucleic acid (BNA)
  source 1..22: mol_type = other DNA
  modified_base 11: mod_base = OTHER; note = Uracil
  modified_base 16: mod_base = OTHER; note = Uracil
  modified_base 17: mod_base = OTHER; note = Uracil
  modified_base 18: mod_base = OTHER; note = Uracil
  modified_base 20: mod_base = OTHER; note = Uracil
tcaaggaagatggcatttctag

SEQ ID NO: 13166 - DNA, 22 bp, synthetic construct
  misc_feature 1..22: note = Description of Artificial Sequence: Synthetic Antisense oligonucleotide
  misc_feature 1..22: note = Original Sequence: tcaaggaagauggcauuucuag
  modified_base 1: mod_base = OTHER; note = bicyclic nucleic acid (BNA)
  modified_base 12: mod_base = OTHER; note = bicyclic nucleic acid (BNA)
  modified_base 19: mod_base = OTHER; note = bicyclic nucleic acid (BNA)
  modified_base 22: mod_base = OTHER; note = bicyclic nucleic acid (BNA)
  source 1..22: mol_type = other DNA
  modified_base 11: mod_base = OTHER; note = Uracil
  modified_base 16: mod_base = OTHER; note = Uracil
  modified_base 17: mod_base = OTHER; note = Uracil
  modified_base 18: mod_base = OTHER; note = Uracil
  modified_base 20: mod_base = OTHER; note = Uracil
tcaaggaagatggcatttctag

SEQ ID NO: 13167 - DNA, 22 bp, synthetic construct
  misc_feature 1..22: note = Description of Artificial Sequence: Synthetic Antisense oligonucleotide
  misc_feature 1..22: note = Original Sequence: tcaaggaagauggcauuucuag
  modified_base 1: mod_base = OTHER; note = bicyclic nucleic acid (BNA)
  modified_base 12: mod_base = OTHER; note = bicyclic nucleic acid (BNA)
  modified_base 14: mod_base = OTHER; note = bicyclic nucleic acid (BNA)
  modified_base 22: mod_base = OTHER; note = bicyclic nucleic acid (BNA)
  source 1..22: mol_type = other DNA
  modified_base 11: mod_base = OTHER; note = Uracil
  modified_base 16: mod_base = OTHER; note = Uracil
  modified_base 17: mod_base = OTHER; note = Uracil
  modified_base 18: mod_base = OTHER; note = Uracil
  modified_base 20: mod_base = OTHER; note = Uracil
tcaaggaagatggcatttctag

SEQ ID NO: 13168 - DNA, 22 bp, synthetic construct
  misc_feature 1..22: note = Description of Artificial Sequence: Synthetic Antisense oligonucleotide
  misc_feature 1..22: note = Original Sequence: tcaaggaagauggcauuucuag
  modified_base 1: mod_base = OTHER; note = bicyclic nucleic acid (BNA)
  modified_base 6: mod_base = OTHER; note = bicyclic nucleic acid (BNA)
  modified_base 12: mod_base = OTHER; note = bicyclic nucleic acid (BNA)
  modified_base 22: mod_base = OTHER; note = bicyclic nucleic acid (BNA)
  source 1..22: mol_type = other DNA
  modified_base 11: mod_base = OTHER; note = Uracil
  modified_base 16: mod_base = OTHER; note = Uracil
  modified_base 17: mod_base = OTHER; note = Uracil
  modified_base 18: mod_base = OTHER; note = Uracil
  modified_base 20: mod_base = OTHER; note = Uracil
tcaaggaagatggcatttctag

SEQ ID NO: 13169 - DNA, 22 bp, synthetic construct
  misc_feature 1..22: note = Description of Artificial Sequence: Synthetic Antisense oligonucleotide
  misc_feature 1..22: note = Original Sequence: tcaaggaagauggcauuucuag
  modified_base 1: mod_base = OTHER; note = bicyclic nucleic acid (BNA)
  modified_base 5..6: mod_base = OTHER; note = bicyclic nucleic acid (BNA)
  modified_base 22: mod_base = OTHER; note = bicyclic nucleic acid (BNA)
  source 1..22: mol_type = other DNA
  modified_base 11: mod_base = OTHER; note = Uracil
  modified_base 16: mod_base = OTHER; note = Uracil
  modified_base 17: mod_base = OTHER; note = Uracil
  modified_base 18: mod_base = OTHER; note = Uracil
  modified_base 20: mod_base = OTHER; note = Uracil
tcaaggaagatggcatttctag

SEQ ID NO: 13170 - DNA, 22 bp, synthetic construct
  misc_feature 1..22: note = Description of Artificial Sequence: Synthetic Antisense oligonucleotide
  misc_feature 1..22: note = Original Sequence: tcaaggaagauggcauuucuag
  modified_base 1..2: mod_base = OTHER; note = bicyclic nucleic acid (BNA)
  modified_base 14: mod_base = OTHER; note = bicyclic nucleic acid (BNA)
  modified_base 22: mod_base = OTHER; note = bicyclic nucleic acid (BNA)
  source 1..22: mol_type = other DNA
  modified_base 11: mod_base = OTHER; note = Uracil
  modified_base 16: mod_base = OTHER; note = Uracil
  modified_base 17: mod_base = OTHER; note = Uracil
  modified_base 18: mod_base = OTHER; note = Uracil
  modified_base 20: mod_base = OTHER; note = Uracil
tcaaggaagatggcatttctag

SEQ ID NO: 13171 - DNA, 22 bp, synthetic construct
  misc_feature 1..22: note = Description of Artificial Sequence: Synthetic Antisense oligonucleotide
  misc_feature 1..22: note = Original Sequence: tcaaggaagauggcauuucuag
  modified_base 1: mod_base = OTHER; note = bicyclic nucleic acid (BNA)
  modified_base 9: mod_base = OTHER; note = bicyclic nucleic acid (BNA)
  modified_base 12: mod_base = OTHER; note = bicyclic nucleic acid (BNA)
  modified_base 22: mod_base = OTHER; note = bicyclic nucleic acid (BNA)
  source 1..22: mol_type = other DNA
  modified_base 11: mod_base = OTHER; note = Uracil
  modified_base 16: mod_base = OTHER; note = Uracil
  modified_base 17: mod_base = OTHER; note = Uracil
  modified_base 18: mod_base = OTHER; note = Uracil
  modified_base 20: mod_base = OTHER; note = Uracil
tcaaggaagatggcatttctag

SEQ ID NO: 13172 - DNA, 22 bp, synthetic construct
  misc_feature 1..22: note = Description of Artificial Sequence: Synthetic Antisense oligonucleotide
  misc_feature 1..22: note = Original Sequence: tcaaggaagauggcauuucuag
  modified_base 1..2: mod_base = OTHER; note = bicyclic nucleic acid (BNA)
  modified_base 5: mod_base = OTHER; note = bicyclic nucleic acid (BNA)
  modified_base 22: mod_base = OTHER; note = bicyclic nucleic acid (BNA)
  source 1..22: mol_type = other DNA
  modified_base 11: mod_base = OTHER; note = Uracil
  modified_base 16: mod_base = OTHER; note = Uracil
  modified_base 17: mod_base = OTHER; note = Uracil
  modified_base 18: mod_base = OTHER; note = Uracil
  modified_base 20: mod_base = OTHER; note = Uracil
tcaaggaagatggcatttctag

SEQ ID NO: 13173 - DNA, 22 bp, synthetic construct
  misc_feature 1..22: note = Description of Artificial Sequence: Synthetic Antisense oligonucleotide
  misc_feature 1..22: note = Original Sequence: tcaaggaagauggcauuucuag
  modified_base 1: mod_base = OTHER; note = bicyclic nucleic acid (BNA)
  modified_base 13: mod_base = OTHER; note = bicyclic nucleic acid (BNA)
  modified_base 19: mod_base = OTHER; note = bicyclic nucleic acid (BNA)
  modified_base 22: mod_base = OTHER; note = bicyclic nucleic acid (BNA)
  source 1..22: mol_type = other DNA
  modified_base 11: mod_base = OTHER; note = Uracil
  modified_base 16: mod_base = OTHER; note = Uracil
  modified_base 17: mod_base = OTHER; note = Uracil
  modified_base 18: mod_base = OTHER; note = Uracil
  modified_base 20: mod_base = OTHER; note = Uracil
tcaaggaagatggcatttctag

SEQ ID NO: 13174 - DNA, 22 bp, synthetic construct
  misc_feature 1..22: note = Description of Artificial Sequence: Synthetic Antisense oligonucleotide
  misc_feature 1..22: note = Original Sequence: tcaaggaagauggcauuucuag
  modified_base 1: mod_base = OTHER; note = bicyclic nucleic acid (BNA)
  modified_base 12..13: mod_base = OTHER; note = bicyclic nucleic acid (BNA)
  modified_base 22: mod_base = OTHER; note = bicyclic nucleic acid (BNA)
  source 1..22: mol_type = other DNA
  modified_base 11: mod_base = OTHER; note = Uracil
  modified_base 16: mod_base = OTHER; note = Uracil
  modified_base 17: mod_base = OTHER; note = Uracil
  modified_base 18: mod_base = OTHER; note = Uracil
  modified_base 20: mod_base = OTHER; note = Uracil
tcaaggaagatggcatttctag

SEQ ID NO: 13175 - DNA, 22 bp, synthetic construct
  misc_feature 1..22: note = Description of Artificial Sequence: Synthetic Antisense oligonucleotide
  misc_feature 1..22: note = Original Sequence: tcaaggaagauggcauuucuag
  modified_base 1: mod_base = OTHER; note = bicyclic nucleic acid (BNA)
  modified_base 5: mod_base = OTHER; note = bicyclic nucleic acid (BNA)
  modified_base 12: mod_base = OTHER; note = bicyclic nucleic acid (BNA)
  modified_base 22: mod_base = OTHER; note = bicyclic nucleic acid (BNA)
  source 1..22: mol_type = other DNA
  modified_base 11: mod_base = OTHER; note = Uracil
  modified_base 16: mod_base = OTHER; note = Uracil
  modified_base 17: mod_base = OTHER; note = Uracil
  modified_base 18: mod_base = OTHER; note = Uracil
  modified_base 20: mod_base = OTHER; note = Uracil
tcaaggaagatggcatttctag

SEQ ID NO: 13176 - DNA, 22 bp, synthetic construct
  misc_feature 1..22: note = Description of Artificial Sequence: Synthetic Antisense oligonucleotide
  misc_feature 1..22: note = Original Sequence: tcaaggaagauggcauuucuag
  modified_base 1..2: mod_base = OTHER; note = bicyclic nucleic acid (BNA)
  modified_base 13: mod_base = OTHER; note = bicyclic nucleic acid (BNA)
  modified_base 22: mod_base = OTHER; note = bicyclic nucleic acid (BNA)
  source 1..22: mol_type = other DNA
  modified_base 11: mod_base = OTHER; note = Uracil
  modified_base 16: mod_base = OTHER; note = Uracil
  modified_base 17: mod_base = OTHER; note = Uracil
  modified_base 18: mod_base = OTHER; note = Uracil
  modified_base 20: mod_base = OTHER; note = Uracil
tcaaggaagatggcatttctag

SEQ ID NO: 13177 - DNA, 22 bp, synthetic construct
  misc_feature 1..22: note = Description of Artificial Sequence: Synthetic Antisense oligonucleotide
  misc_feature 1..22: note = Original Sequence: tcaaggaagauggcauuucuag
  modified_base 1: mod_base = OTHER; note = bicyclic nucleic acid (BNA)
  modified_base 9: mod_base = OTHER; note = bicyclic nucleic acid (BNA)
  modified_base 13: mod_base = OTHER; note = bicyclic nucleic acid (BNA)
  modified_base 22: mod_base = OTHER; note = bicyclic nucleic acid (BNA)
  source 1..22: mol_type = other DNA
  modified_base 11: mod_base = OTHER; note = Uracil
  modified_base 16: mod_base = OTHER; note = Uracil
  modified_base 17: mod_base = OTHER; note = Uracil
  modified_base 18: mod_base = OTHER; note = Uracil
  modified_base 20: mod_base = OTHER; note = Uracil
tcaaggaagatggcatttctag

SEQ ID NO: 13178 - DNA, 22 bp, synthetic construct
  misc_feature 1..22: note = Description of Artificial Sequence: Synthetic Antisense oligonucleotide
  misc_feature 1..22: note = Original Sequence: tcaaggaagauggcauuucuag
  modified_base 1..2: mod_base = OTHER; note = bicyclic nucleic acid (BNA)
  modified_base 19: mod_base = OTHER; note = bicyclic nucleic acid (BNA)
  modified_base 22: mod_base = OTHER; note = bicyclic nucleic acid (BNA)
  source 1..22: mol_type = other DNA
  modified_base 11: mod_base = OTHER; note = Uracil
  modified_base 16: mod_base = OTHER; note = Uracil
  modified_base 17: mod_base = OTHER; note = Uracil
  modified_base 18: mod_base = OTHER; note = Uracil
  modified_base 20: mod_base = OTHER; note = Uracil
tcaaggaagatggcatttctag

SEQ ID NO: 13179 - DNA, 22 bp, synthetic construct
  misc_feature 1..22: note = Description of Artificial Sequence: Synthetic Antisense oligonucleotide
  misc_feature 1..22: note = Original Sequence: tcaaggaagauggcauuucuag
  modified_base 1..2: mod_base = OTHER; note = bicyclic nucleic acid (BNA)
  modified_base 9: mod_base = OTHER; note = bicyclic nucleic acid (BNA)
  modified_base 22: mod_base = OTHER; note = bicyclic nucleic acid (BNA)
  source 1..22: mol_type = other DNA
  modified_base 11: mod_base = OTHER; note = Uracil
  modified_base 16: mod_base = OTHER; note = Uracil
  modified_base 17: mod_base = OTHER; note = Uracil
  modified_base 18: mod_base = OTHER; note = Uracil
  modified_base 20: mod_base = OTHER; note = Uracil
tcaaggaagatggcatttctag

SEQ ID NO: 13180 - DNA, 22 bp, synthetic construct
  misc_feature 1..22: note = Description of Artificial Sequence: Synthetic Antisense oligonucleotide
  misc_feature 1..22: note = Original Sequence: tcaaggaagauggcauuucuag
  modified_base 1: mod_base = OTHER; note = bicyclic nucleic acid (BNA)
  modified_base 14: mod_base = OTHER; note = bicyclic nucleic acid (BNA)
  modified_base 19: mod_base = OTHER; note = bicyclic nucleic acid (BNA)
  modified_base 22: mod_base = OTHER; note = bicyclic nucleic acid (BNA)
  source 1..22: mol_type = other DNA
  modified_base 11: mod_base = OTHER; note = Uracil
  modified_base 16: mod_base = OTHER; note = Uracil
  modified_base 17: mod_base = OTHER; note = Uracil
  modified_base 18: mod_base = OTHER; note = Uracil
  modified_base 20: mod_base = OTHER; note = Uracil
tcaaggaagatggcatttctag

SEQ ID NO: 13181 - DNA, 22 bp, synthetic construct
  misc_feature 1..22: note = Description of Artificial Sequence: Synthetic Antisense oligonucleotide
  misc_feature 1..22: note = Original Sequence: tcaaggaagauggcauuucuag
  modified_base 1: mod_base = OTHER; note = bicyclic nucleic acid (BNA)
  modified_base 9: mod_base = OTHER; note = bicyclic nucleic acid (BNA)
  modified_base 19: mod_base = OTHER; note = bicyclic nucleic acid (BNA)
  modified_base 22: mod_base = OTHER; note = bicyclic nucleic acid (BNA)
  source 1..22: mol_type = other DNA
  modified_base 11: mod_base = OTHER; note = Uracil
  modified_base 16: mod_base = OTHER; note = Uracil
  modified_base 17: mod_base = OTHER; note = Uracil
  modified_base 18: mod_base = OTHER; note = Uracil
  modified_base 20: mod_base = OTHER; note = Uracil
tcaaggaagatggcatttctag

SEQ ID NO: 13182 - RNA, 18 nt, synthetic construct
  misc_feature 1..18: note = Description of Artificial Sequence: Synthetic Antisense oligonucleotide
  modified_base 1..2: mod_base = OTHER; note = bicyclic nucleic acid (BNA)
  modified_base 18: mod_base = OTHER; note = bicyclic nucleic acid (BNA)
  modified_base 9: mod_base = OTHER; note = 5-methyl
  modified_base 13..14: mod_base = OTHER; note = 5-methyl
  modified_base 18: mod_base = OTHER; note = 5-methyl
  source 1..18: mol_type = other RNA
ggtaagttctgtccaagc

SEQ ID NO: 13183 - RNA, 18 nt, synthetic construct
  misc_feature 1..18: note = Description of Artificial Sequence: Synthetic Antisense oligonucleotide
  modified_base 1: mod_base = OTHER; note = bicyclic nucleic acid (BNA)
  modified_base 9: mod_base = OTHER; note = bicyclic nucleic acid (BNA)
  modified_base 18: mod_base = OTHER; note = bicyclic nucleic acid (BNA)
  modified_base 9: mod_base = OTHER; note = 5-methyl
  modified_base 13..14: mod_base = OTHER; note = 5-methyl
  modified_base 18: mod_base = OTHER; note = 5-methyl
  source 1..18: mol_type = other RNA
ggtaagttctgtccaagc

SEQ ID NO: 13184 - RNA, 18 nt, synthetic construct
  misc_feature 1..18: note = Description of Artificial Sequence: Synthetic Antisense oligonucleotide
  modified_base 1: mod_base = OTHER; note = bicyclic nucleic acid (BNA)
  modified_base 11: mod_base = OTHER; note = bicyclic nucleic acid (BNA)
  modified_base 18: mod_base = OTHER; note = bicyclic nucleic acid (BNA)
  modified_base 9: mod_base = OTHER; note = 5-methyl
  modified_base 13..14: mod_base = OTHER; note = 5-methyl
  modified_base 18: mod_base = OTHER; note = 5-methyl
  source 1..18: mol_type = other RNA
ggtaagttctgtccaagc

SEQ ID NO: 13185 - RNA, 18 nt, synthetic construct
  misc_feature 1..18: note = Description of Artificial Sequence: Synthetic Antisense oligonucleotide
  modified_base 1: mod_base = OTHER; note = bicyclic nucleic acid (BNA)
  modified_base 6: mod_base = OTHER; note = bicyclic nucleic acid (BNA)
  modified_base 18: mod_base = OTHER; note = bicyclic nucleic acid (BNA)
  modified_base 9: mod_base = OTHER; note = 5-methyl
  modified_base 13..14: mod_base = OTHER; note = 5-methyl
  modified_base 18: mod_base = OTHER; note = 5-methyl
  source 1..18: mol_type = other RNA
ggtaagttctgtccaagc

SEQ ID NO: 13186 - RNA, 18 nt, synthetic construct
  misc_feature 1..18: note = Description of Artificial Sequence: Synthetic Antisense oligonucleotide
  modified_base 1: mod_base = OTHER; note = bicyclic nucleic acid (BNA)
  modified_base 17..18: mod_base = OTHER; note = bicyclic nucleic acid (BNA)
  modified_base 9: mod_base = OTHER; note = 5-methyl
  modified_base 13..14: mod_base = OTHER; note = 5-methyl
  modified_base 18: mod_base = OTHER; note = 5-methyl
  source 1..18: mol_type = other RNA
ggtaagttctgtccaagc

SEQ ID NO: 13187 - RNA, 18 nt, synthetic construct
  misc_feature 1..18: note = Description of Artificial Sequence: Synthetic Antisense oligonucleotide
  modified_base 1: mod_base = OTHER; note = bicyclic nucleic acid (BNA)
  modified_base 13: mod_base = OTHER; note = bicyclic nucleic acid (BNA)
  modified_base 18: mod_base = OTHER; note = bicyclic nucleic acid (BNA)
  modified_base 9: mod_base = OTHER; note = 5-methyl
  modified_base 13..14: mod_base = OTHER; note = 5-methyl
  modified_base 18: mod_base = OTHER; note = 5-methyl
  source 1..18: mol_type = other RNA
ggtaagttctgtccaagc

SEQ ID NO: 13188 - RNA, 18 nt, synthetic construct
  misc_feature 1..18: note = Description of Artificial Sequence: Synthetic Antisense oligonucleotide
  modified_base 1: mod_base = OTHER; note = bicyclic nucleic acid (BNA)
  modified_base 14: mod_base = OTHER; note = bicyclic nucleic acid (BNA)
  modified_base 18: mod_base = OTHER; note = bicyclic nucleic acid (BNA)
  modified_base 9: mod_base = OTHER; note = 5-methyl
  modified_base 13..14: mod_base = OTHER; note = 5-methyl
  modified_base 18: mod_base = OTHER; note = 5-methyl
  source 1..18: mol_type = other RNA
ggtaagttctgtccaagc

SEQ ID NO: 13189 - RNA, 18 nt, synthetic construct
  misc_feature 1..18: note = Description of Artificial Sequence: Synthetic Antisense oligonucleotide
  modified_base 1: mod_base = OTHER; note = bicyclic nucleic acid (BNA)
  modified_base 16: mod_base = OTHER; note = bicyclic nucleic acid (BNA)
  modified_base 18: mod_base = OTHER; note = bicyclic nucleic acid (BNA)
  modified_base 8: mod_base = OTHER; note = 5-methyl
  modified_base 12..13: mod_base = OTHER; note = 5-methyl
  modified_base 17..18: mod_base = OTHER; note = 5-methyl
  source 1..18: mol_type = other RNA
gtaagttctgtccaagcc

SEQ ID NO: 13190 - RNA, 18 nt, synthetic construct
  misc_feature 1..18: note = Description of Artificial Sequence: Synthetic Antisense oligonucleotide
  modified_base 1: mod_base = OTHER; note = bicyclic nucleic acid (BNA)
  modified_base 10: mod_base = OTHER; note = bicyclic nucleic acid (BNA)
  modified_base 18: mod_base = OTHER; note = bicyclic nucleic acid (BNA)
  modified_base 8: mod_base = OTHER; note = 5-methyl
  modified_base 12..13: mod_base = OTHER; note = 5-methyl
  modified_base 17..18: mod_base = OTHER; note = 5-methyl
  source 1..18: mol_type = other RNA
gtaagttctgtccaagcc

SEQ ID NO: 13191 - RNA, 18 nt, synthetic construct
  misc_feature 1..18: note = Description of Artificial Sequence: Synthetic Antisense oligonucleotide
  modified_base 1: mod_base = OTHER; note = bicyclic nucleic acid (BNA)
  modified_base 5: mod_base = OTHER; note = bicyclic nucleic acid (BNA)
  modified_base 18: mod_base = OTHER; note = bicyclic nucleic acid (BNA)
  modified_base 8: mod_base = OTHER; note = 5-methyl
  modified_base 12..13: mod_base = OTHER; note = 5-methyl
  modified_base 17..18: mod_base = OTHER; note = 5-methyl
  source 1..18: mol_type = other RNA
gtaagttctgtccaagcc

SEQ ID NO: 13192 - RNA, 18 nt, synthetic construct
  misc_feature 1..18: note = Description of Artificial Sequence: Synthetic Antisense oligonucleotide
  modified_base 1: mod_base = OTHER; note = bicyclic nucleic acid (BNA)
  modified_base 17..18: mod_base = OTHER; note = bicyclic nucleic acid (BNA)
  modified_base 8: mod_base = OTHER; note = 5-methyl
  modified_base 12..13: mod_base = OTHER; note = 5-methyl
  modified_base 17..18: mod_base = OTHER; note = 5-methyl
  source 1..18: mol_type = other RNA
gtaagttctgtccaagcc

SEQ ID NO: 13193 - RNA, 18 nt, synthetic construct
  misc_feature 1..18: note = Description of Artificial Sequence: Synthetic Antisense oligonucleotide
  modified_base 1: mod_base = OTHER; note = bicyclic nucleic acid (BNA)
  modified_base 12: mod_base = OTHER; note = bicyclic nucleic acid (BNA)
  modified_base 18: mod_base = OTHER; note = bicyclic nucleic acid (BNA)
  modified_base 8: mod_base = OTHER; note = 5-methyl
  modified_base 12..13: mod_base = OTHER; note = 5-methyl
  modified_base 17..18: mod_base = OTHER; note = 5-methyl
  source 1..18: mol_type = other RNA
gtaagttctgtccaagcc

SEQ ID NO: 13194 - RNA, 18 nt, synthetic construct
  misc_feature 1..18: note = Description of Artificial Sequence: Synthetic Antisense oligonucleotide
  modified_base 1: mod_base = OTHER; note = bicyclic nucleic acid (BNA)
  modified_base 13: mod_base = OTHER; note = bicyclic nucleic acid (BNA)
  modified_base 18: mod_base = OTHER; note = bicyclic nucleic acid (BNA)
  modified_base 8: mod_base = OTHER; note = 5-methyl
  modified_base 12..13: mod_base = OTHER; note = 5-methyl
  modified_base 17..18: mod_base = OTHER; note = 5-methyl
  source 1..18: mol_type = other RNA
gtaagttctgtccaagcc

SEQ ID NO: 13195 - RNA, 18 nt, synthetic construct
  misc_feature 1..18: note = Description of Artificial Sequence: Synthetic Antisense oligonucleotide
  modified_base 1: mod_base = OTHER; note = bicyclic nucleic acid (BNA)
  modified_base 8: mod_base = OTHER; note = bicyclic nucleic acid (BNA)
  modified_base 18: mod_base = OTHER; note = bicyclic nucleic acid (BNA)
  modified_base 8: mod_base = OTHER; note = 5-methyl
  modified_base 12..13: mod_base = OTHER; note = 5-methyl
  modified_base 17..18: mod_base = OTHER; note = 5-methyl
  source 1..18: mol_type = other RNA
gtaagttctgtccaagcc

SEQ ID NO: 13196 - RNA, 18 nt, synthetic construct
  misc_feature 1..18: note = Description of Artificial Sequence: Synthetic Antisense oligonucleotide
  modified_base 1..2: mod_base = OTHER; note = bicyclic nucleic acid (BNA)
  modified_base 18: mod_base = OTHER; note = bicyclic nucleic acid (BNA)
  modified_base 4: mod_base = OTHER; note = 5-methyl
  modified_base 13: mod_base = OTHER; note = 5-methyl
  modified_base 17..18: mod_base = OTHER; note = 5-methyl
  source 1..18: mol_type = other RNA
agtcggtaagttctgtcc

SEQ ID NO: 13197 - RNA, 18 nt, synthetic construct
  misc_feature 1..18: note = Description of Artificial Sequence: Synthetic Antisense oligonucleotide
  modified_base 1: mod_base = OTHER; note = bicyclic nucleic acid (BNA)
  modified_base 4: mod_base = OTHER; note = bicyclic nucleic acid (BNA)
  modified_base 18: mod_base = OTHER; note = bicyclic nucleic acid (BNA)
  modified_base 4: mod_base = OTHER; note = 5-methyl
  modified_base 13: mod_base = OTHER; note = 5-methyl
  modified_base 17..18: mod_base = OTHER; note = 5-methyl
  source 1..18: mol_type = other RNA
agtcggtaagttctgtcc

SEQ ID NO: 13198 - RNA, 18 nt, synthetic construct
  misc_feature 1..18: note = Description of Artificial Sequence: Synthetic Antisense oligonucleotide
  modified_base 1: mod_base = OTHER; note = bicyclic nucleic acid (BNA)
  modified_base 10: mod_base = OTHER; note = bicyclic nucleic acid (BNA)
  modified_base 18: mod_base = OTHER; note = bicyclic nucleic acid (BNA)
  modified_base 4: mod_base = OTHER; note = 5-methyl
  modified_base 13: mod_base = OTHER; note = 5-methyl
  modified_base 17..18: mod_base = OTHER; note = 5-methyl
  source 1..18: mol_type = other RNA
agtcggtaagttctgtcc

SEQ ID NO: 13199 - RNA, 18 nt, synthetic construct
  misc_feature 1..18: note = Description of Artificial Sequence: Synthetic Antisense oligonucleotide
  modified_base 1: mod_base = OTHER; note = bicyclic nucleic acid (BNA)
  modified_base 5: mod_base = OTHER; note = bicyclic nucleic acid (BNA)
  modified_base 18: mod_base = OTHER; note = bicyclic nucleic acid (BNA)
  modified_base 4: mod_base = OTHER; note = 5-methyl
  modified_base 13: mod_base = OTHER; note = 5-methyl
  modified_base 17..18: mod_base = OTHER; note = 5-methyl
  source 1..18: mol_type = other RNA
agtcggtaagttctgtcc

SEQ ID NO: 13200 - RNA, 18 nt, synthetic construct
  misc_feature 1..18: note = Description of Artificial Sequence: Synthetic Antisense oligonucleotide
  modified_base 1: mod_base = OTHER; note = bicyclic nucleic acid (BNA)
  modified_base 6: mod_base = OTHER; note = bicyclic nucleic acid (BNA)
  modified_base 18: mod_base = OTHER; note = bicyclic nucleic acid (BNA)
  modified_base 4: mod_base = OTHER; note = 5-methyl
  modified_base 13: mod_base = OTHER; note = 5-methyl
  modified_base 17..18: mod_base = OTHER; note = 5-methyl
  source 1..18: mol_type = other RNA
agtcggtaagttctgtcc

SEQ ID NO: 13201 - RNA, 18 nt, synthetic construct
  misc_feature 1..18: note = Description of Artificial Sequence: Synthetic Antisense oligonucleotide
  modified_base 1: mod_base = OTHER; note = bicyclic nucleic acid (BNA)
  modified_base 17..18: mod_base = OTHER; note = bicyclic nucleic acid (BNA)
  modified_base 4: mod_base = OTHER; note = 5-methyl
  modified_base 13: mod_base = OTHER; note = 5-methyl
  modified_base 17..18: mod_base = OTHER; note = 5-methyl
  source 1..18: mol_type = other RNA
agtcggtaagttctgtcc

SEQ ID NO: 13202 - RNA, 18 nt, synthetic construct
  misc_feature 1..18: note = Description of Artificial Sequence: Synthetic Antisense oligonucleotide
  modified_base 1: mod_base = OTHER; note = bicyclic nucleic acid (BNA)
  modified_base 13: mod_base = OTHER; note = bicyclic nucleic acid (BNA)
  modified_base 18: mod_base = OTHER; note = bicyclic nucleic acid (BNA)
  modified_base 4: mod_base = OTHER; note = 5-methyl
  modified_base 13: mod_base = OTHER; note = 5-methyl
  modified_base 17..18: mod_base = OTHER; note = 5-methyl
  source 1..18: mol_type = other RNA
agtcggtaagttctgtcc

SEQ ID NO: 13203 - RNA, 18 nt, synthetic construct
  misc_feature 1..18: note = Description of Artificial Sequence: Synthetic Antisense oligonucleotide
  modified_base 1: mod_base = OTHER; note = bicyclic nucleic acid (BNA)
  modified_base 15: mod_base = OTHER; note = bicyclic nucleic acid (BNA)
  modified_base 18: mod_base = OTHER; note = bicyclic nucleic acid (BNA)
  modified_base 4: mod_base = OTHER; note = 5-methyl
  modified_base 13: mod_base = OTHER; note = 5-methyl
  modified_base 17..18: mod_base = OTHER; note = 5-methyl
  source 1..18: mol_type = other RNA
agtcggtaagttctgtcc

SEQ ID NO: 13204 - RNA, 18 nt, synthetic construct
  misc_feature 1..18: note = Description of Artificial Sequence: Synthetic Antisense oligonucleotide
  modified_base 1: mod_base = OTHER; note = 5-methyl
  modified_base 5..6: mod_base = OTHER; note = 5-methyl
  modified_base 10..12: mod_base = OTHER; note = 5-methyl
  modified_base 1: mod_base = OTHER; note = bicyclic nucleic acid (BNA)
  modified_base 3: mod_base = OTHER; note = bicyclic nucleic acid (BNA)
  modified_base 18: mod_base = OTHER; note = bicyclic nucleic acid (BNA)
  source 1..18: mol_type = other RNA
ctgtccaagcccggttga

SEQ ID NO: 13205 - RNA, 18 nt, synthetic construct
  misc_feature 1..18: note = Description of Artificial Sequence: Synthetic Antisense oligonucleotide
  modified_base 1: mod_base = OTHER; note = 5-methyl
  modified_base 5..6: mod_base = OTHER; note = 5-methyl
  modified_base 10..12: mod_base = OTHER; note = 5-methyl
  modified_base 1: mod_base = OTHER; note = bicyclic nucleic acid (BNA)
  modified_base 9: mod_base = OTHER; note = bicyclic nucleic acid (BNA)
  modified_base 18: mod_base = OTHER; note = bicyclic nucleic acid (BNA)
  source 1..18: mol_type = other RNA
ctgtccaagcccggttga

SEQ ID NO: 13206 - RNA, 18 nt, synthetic construct
  misc_feature 1..18: note = Description of Artificial Sequence: Synthetic Antisense oligonucleotide
  modified_base 1: mod_base = OTHER; note = 5-methyl
  modified_base 5..6: mod_base = OTHER; note = 5-methyl
  modified_base 10..12: mod_base = OTHER; note = 5-methyl
  modified_base 1: mod_base = OTHER; note = bicyclic nucleic acid (BNA)
  modified_base 10: mod_base = OTHER; note = bicyclic nucleic acid (BNA)
  modified_base 18: mod_base = OTHER; note = bicyclic nucleic acid (BNA)
  source 1..18: mol_type = other RNA
ctgtccaagcccggttga

SEQ ID NO: 13207 - RNA, 18 nt, synthetic construct
  misc_feature 1..18: note = Description of Artificial Sequence: Synthetic Antisense oligonucleotide
  modified_base 1: mod_base = OTHER; note = 5-methyl
  modified_base 5..6: mod_base = OTHER; note = 5-methyl
  modified_base 10..12: mod_base = OTHER; note = 5-methyl
  modified_base 1: mod_base = OTHER; note = bicyclic nucleic acid (BNA)
  modified_base 5: mod_base = OTHER; note = bicyclic nucleic acid (BNA)
  modified_base 18: mod_base = OTHER; note = bicyclic nucleic acid (BNA)
  source 1..18: mol_type = other RNA
ctgtccaagcccggttga

SEQ ID NO: 13208 - RNA, 18 nt, synthetic construct
  misc_feature 1..18: note = Description of Artificial Sequence: Synthetic Antisense oligonucleotide
  modified_base 1: mod_base = OTHER; note = 5-methyl
  modified_base 5..6: mod_base = OTHER; note = 5-methyl
  modified_base 10..12: mod_base = OTHER; note = 5-methyl
  modified_base 1: mod_base = OTHER; note = bicyclic nucleic acid (BNA)
  modified_base 11: mod_base = OTHER; note = bicyclic nucleic acid (BNA)
  modified_base 18: mod_base = OTHER; note = bicyclic nucleic acid (BNA)
  source 1..18: mol_type = other RNA
ctgtccaagcccggttga

SEQ ID NO: 13209 - RNA, 18 nt, synthetic construct
  misc_feature 1..18: note = Description of Artificial Sequence: Synthetic Antisense oligonucleotide
  modified_base 1: mod_base = OTHER; note = 5-methyl
  modified_base 5..6: mod_base = OTHER; note = 5-methyl
  modified_base 10..12: mod_base = OTHER; note = 5-methyl
  modified_base 1: mod_base = OTHER; note = bicyclic nucleic acid (BNA)
  modified_base 6: mod_base = OTHER; note = bicyclic nucleic acid (BNA)
  modified_base 18: mod_base = OTHER; note = bicyclic nucleic acid (BNA)
  source 1..18: mol_type = other RNA
ctgtccaagcccggttga

SEQ ID NO: 13210 - RNA, 18 nt, synthetic construct
  misc_feature 1..18: note = Description of Artificial Sequence: Synthetic Antisense oligonucleotide
  modified_base 1: mod_base = OTHER; note = 5-methyl
  modified_base 5..6: mod_base = OTHER; note = 5-methyl
  modified_base 10..12: mod_base = OTHER; note = 5-methyl
  modified_base 1: mod_base = OTHER; note = bicyclic nucleic acid (BNA)
  modified_base 17..18: mod_base = OTHER; note = bicyclic nucleic acid (BNA)
  source 1..18: mol_type = other RNA
ctgtccaagcccggttga

SEQ ID NO: 13211 - RNA, 18 nt, synthetic construct
  misc_feature 1..18: note = Description of Artificial Sequence: Synthetic Antisense oligonucleotide
  modified_base 1: mod_base = OTHER; note = 5-methyl
  modified_base 5..6: mod_base = OTHER; note = 5-methyl
  modified_base 10..12: mod_base = OTHER; note = 5-methyl
  modified_base 1: mod_base = OTHER; note = bicyclic nucleic acid (BNA)
  modified_base 12: mod_base = OTHER; note = bicyclic nucleic acid (BNA)
  modified_base 18: mod_base = OTHER; note = bicyclic nucleic acid (BNA)
  source 1..18: mol_type = other RNA
ctgtccaagcccggttga

SEQ ID NO: 13212 - RNA, 18 nt, synthetic construct
  misc_feature 1..18: note = Description of Artificial Sequence: Synthetic Antisense oligonucleotide
  modified_base 1: mod_base = OTHER; note = 5-methyl
  modified_base 5..6: mod_base = OTHER; note = 5-methyl
  modified_base 10..12: mod_base = OTHER; note = 5-methyl
  modified_base 1: mod_base = OTHER; note = bicyclic nucleic acid (BNA)
  modified_base 13: mod_base = OTHER; note = bicyclic nucleic acid (BNA)
  modified_base 18: mod_base = OTHER; note = bicyclic nucleic acid (BNA)
  source 1..18: mol_type = other RNA
ctgtccaagcccggttga

SEQ ID NO: 13213 - RNA, 18 nt, synthetic construct
  misc_feature 1..18: note = Description of Artificial Sequence: Synthetic Antisense oligonucleotide
  modified_base 1: mod_base = OTHER; note = 5-methyl
  modified_base 5..6: mod_base = OTHER; note = 5-methyl
  modified_base 10..12: mod_base = OTHER; note = 5-methyl
  modified_base 1: mod_base = OTHER; note = bicyclic nucleic acid (BNA)
  modified_base 14: mod_base = OTHER; note = bicyclic nucleic acid (BNA)
  modified_base 18: mod_base = OTHER; note = bicyclic nucleic acid (BNA)
  source 1..18: mol_type = other RNA
ctgtccaagcccggttga

SEQ ID NO: 13214 - RNA, 18 nt, synthetic construct
  misc_feature 1..18: note = Description of Artificial Sequence: Synthetic Antisense oligonucleotide
  modified_base 1: mod_base = OTHER; note = bicyclic nucleic acid (BNA)
  modified_base 9: mod_base = OTHER; note = bicyclic nucleic acid (BNA)
  modified_base 14: mod_base = OTHER; note = bicyclic nucleic acid (BNA)
  modified_base 18: mod_base = OTHER; note = bicyclic nucleic acid (BNA)
  modified_base 9: mod_base = OTHER; note = 5-methyl
  modified_base 13..14: mod_base = OTHER; note = 5-methyl
  modified_base 18: mod_base = OTHER; note = 5-methyl
  source 1..18: mol_type = other RNA
ggtaagttctgtccaagc

SEQ ID NO: 13215 - RNA, 18 nt, synthetic construct
  misc_feature 1..18: note = Description of Artificial Sequence: Synthetic Antisense oligonucleotide
  modified_base 1: mod_base = OTHER; note = bicyclic nucleic acid (BNA)
  modified_base 6: mod_base = OTHER; note = bicyclic nucleic acid (BNA)
  modified_base 14: mod_base = OTHER; note = bicyclic nucleic acid (BNA)
  modified_base 18: mod_base = OTHER; note = bicyclic nucleic acid (BNA)
  modified_base 9: mod_base = OTHER; note = 5-methyl
  modified_base 13..14: mod_base = OTHER; note = 5-methyl
  modified_base 18: mod_base = OTHER; note = 5-methyl
  source 1..18: mol_type = other RNA
ggtaagttctgtccaagc

SEQ ID NO: 13216 - RNA, 18 nt, synthetic construct
  misc_feature 1..18: note = Description of Artificial Sequence: Synthetic Antisense oligonucleotide
  modified_base 1: mod_base = OTHER; note = bicyclic nucleic acid (BNA)
  modified_base 13: mod_base = OTHER; note = bicyclic nucleic acid (BNA)
  modified_base 17..18: mod_base = OTHER; note = bicyclic nucleic acid (BNA)
  modified_base 9: mod_base = OTHER; note = 5-methyl
  modified_base 13..14: mod_base = OTHER; note = 5-methyl
  modified_base 18: mod_base = OTHER; note = 5-methyl
  source 1..18: mol_type = other RNA
ggtaagttctgtccaagc

SEQ ID NO: 13217 - RNA, 18 nt, synthetic construct
  misc_feature 1..18: note = Description of Artificial Sequence: Synthetic Antisense oligonucleotide
  modified_base 1: mod_base = OTHER; note = bicyclic nucleic acid (BNA)
  modified_base 6: mod_base = OTHER; note = bicyclic nucleic acid (BNA)
  modified_base 9: mod_base = OTHER; note = bicyclic nucleic acid (BNA)
  modified_base 18: mod_base = OTHER; note = bicyclic nucleic acid (BNA)
  modified_base 9: mod_base = OTHER; note = 5-methyl
  modified_base 13..14: mod_base = OTHER; note = 5-methyl
  modified_base 18: mod_base = OTHER; note = 5-methyl
  source 1..18: mol_type = other RNA
ggtaagttctgtccaagc

SEQ ID NO: 13218 - RNA, 18 nt, synthetic construct
  misc_feature 1..18: note = Description of Artificial Sequence: Synthetic Antisense oligonucleotide
  modified_base 1: mod_base = OTHER; note = bicyclic nucleic acid (BNA)
  modified_base 13..14: mod_base = OTHER; note = bicyclic nucleic acid (BNA)
  modified_base 18: mod_base = OTHER; note = bicyclic nucleic acid (BNA)
  modified_base 9: mod_base = OTHER; note = 5-methyl
  modified_base 13..14: mod_base = OTHER; note = 5-methyl
  modified_base 18: mod_base = OTHER; note = 5-methyl
  source 1..18: mol_type = other RNA
ggtaagttctgtccaagc

SEQ ID NO: 13219 - RNA, 18 nt, synthetic construct
  misc_feature 1..18: note = Description of Artificial Sequence: Synthetic Antisense oligonucleotide
  modified_base 1..2: mod_base = OTHER; note = bicyclic nucleic acid (BNA)
  modified_base 17..18: mod_base = OTHER; note = bicyclic nucleic acid (BNA)
  modified_base 9: mod_base = OTHER; note = 5-methyl
  modified_base 13..14: mod_base = OTHER; note = 5-methyl
  modified_base 18: mod_base = OTHER; note = 5-methyl
  source 1..18: mol_type = other RNA
ggtaagttctgtccaagc

SEQ ID NO: 13220 - RNA, 18 nt, synthetic construct
  misc_feature 1..18: note = Description of Artificial Sequence: Synthetic Antisense oligonucleotide
  modified_base 1: mod_base = OTHER; note = bicyclic nucleic acid (BNA)
  modified_base 6: mod_base = OTHER; note = bicyclic nucleic acid (BNA)
  modified_base 13: mod_base = OTHER; note = bicyclic nucleic acid (BNA)
  modified_base 18: mod_base = OTHER; note = bicyclic nucleic acid (BNA)
  modified_base 9: mod_base = OTHER; note = 5-methyl
  modified_base 13..14: mod_base = OTHER; note = 5-methyl
  modified_base 18: mod_base = OTHER; note = 5-methyl
  source 1..18: mol_type = other RNA
ggtaagttctgtccaagc

SEQ ID NO: 13221 - RNA, 18 nt, synthetic construct
  misc_feature 1..18: note = Description of Artificial Sequence: Synthetic Antisense oligonucleotide
  modified_base 1: mod_base = OTHER; note = bicyclic nucleic acid (BNA)
  modified_base 9: mod_base = OTHER; note = bicyclic nucleic acid (BNA)
  modified_base 11: mod_base = OTHER; note = bicyclic nucleic acid (BNA)
  modified_base 18: mod_base = OTHER; note = bicyclic nucleic acid (BNA)
  modified_base 9: mod_base = OTHER; note = 5-methyl
  modified_base 13..14: mod_base = OTHER; note = 5-methyl
  modified_base 18: mod_base = OTHER; note = 5-methyl
  source 1..18: mol_type = other RNA
ggtaagttctgtccaagc

SEQ ID NO: 13222 - RNA, 18 nt, synthetic construct
  misc_feature 1..18: note = Description of Artificial Sequence: Synthetic Antisense oligonucleotide
  modified_base 1: mod_base = OTHER; note = bicyclic nucleic acid (BNA)
  modified_base 14: mod_base = OTHER; note = bicyclic nucleic acid (BNA)
  modified_base 17..18: mod_base = OTHER; note = bicyclic nucleic acid (BNA)
  modified_base 9: mod_base = OTHER; note = 5-methyl
  modified_base 13..14: mod_base = OTHER; note = 5-methyl
  modified_base 18: mod_base = OTHER; note = 5-methyl
  source 1..18: mol_type = other RNA
ggtaagttctgtccaagc

SEQ ID NO: 13223 - RNA, 18 nt, synthetic construct
  misc_feature 1..18: note = Description of Artificial Sequence: Synthetic Antisense oligonucleotide
  modified_base 1: mod_base = OTHER; note = bicyclic nucleic acid (BNA)
  modified_base 11: mod_base = OTHER; note = bicyclic nucleic acid (BNA)
  modified_base 13: mod_base = OTHER; note = bicyclic nucleic acid (BNA)
  modified_base 18: mod_base = OTHER; note = bicyclic nucleic acid (BNA)
  modified_base 9: mod_base = OTHER; note = 5-methyl
  modified_base 13..14: mod_base = OTHER; note = 5-methyl
  modified_base 18: mod_base = OTHER; note = 5-methyl
  source 1..18: mol_type = other RNA
ggtaagttctgtccaagc

SEQ ID NO: 13224 - RNA, 18 nt, synthetic construct
  misc_feature 1..18: note = Description of Artificial Sequence: Synthetic Antisense oligonucleotide
  modified_base 1..2: mod_base = OTHER; note = bicyclic nucleic acid (BNA)
  modified_base 6: mod_base = OTHER; note = bicyclic nucleic acid (BNA)
  modified_base 18: mod_base = OTHER; note = bicyclic nucleic acid (BNA)
  modified_base 9: mod_base = OTHER; note = 5-methyl
  modified_base 13..14: mod_base = OTHER; note = 5-methyl
  modified_base 18: mod_base = OTHER; note = 5-methyl
  source 1..18: mol_type = other RNA
ggtaagttctgtccaagc

SEQ ID NO: 13225 - RNA, 18 nt, synthetic construct
  misc_feature 1..18: note = Description of Artificial Sequence: Synthetic Antisense oligonucleotide
  modified_base 1..2: mod_base = OTHER; note = bicyclic nucleic acid (BNA)
  modified_base 11: mod_base = OTHER; note = bicyclic nucleic acid (BNA)
  modified_base 18: mod_base = OTHER; note = bicyclic nucleic acid (BNA)
  modified_base 9: mod_base = OTHER; note = 5-methyl
  modified_base 13..14: mod_base = OTHER; note = 5-methyl
  modified_base 18: mod_base = OTHER; note = 5-methyl
  source 1..18: mol_type = other RNA
ggtaagttctgtccaagc

SEQ ID NO: 13226 - RNA, 18 nt, synthetic construct
  misc_feature 1..18: note = Description of Artificial Sequence: Synthetic Antisense oligonucleotide
  modified_base 1: mod_base = OTHER; note = bicyclic nucleic acid (BNA)
  modified_base 9: mod_base = OTHER; note = bicyclic nucleic acid (BNA)
  modified_base 17..18: mod_base = OTHER; note = bicyclic nucleic acid (BNA)
  modified_base 9: mod_base = OTHER; note = 5-methyl
  modified_base 13..14: mod_base = OTHER; note = 5-methyl
  modified_base 18: mod_base = OTHER; note = 5-methyl
  source 1..18: mol_type = other RNA
ggtaagttctgtccaagc

SEQ ID NO: 13227 - RNA, 18 nt, synthetic construct
  misc_feature 1..18: note = Description of Artificial Sequence: Synthetic Antisense oligonucleotide
  modified_base 1..2: mod_base = OTHER; note = bicyclic nucleic acid (BNA)
  modified_base 14: mod_base = OTHER; note = bicyclic nucleic acid (BNA)
  modified_base 18: mod_base = OTHER; note = bicyclic nucleic acid (BNA)
  modified_base 9: mod_base = OTHER; note = 5-methyl
  modified_base 13..14: mod_base = OTHER; note = 5-methyl
  modified_base 18: mod_base = OTHER; note = 5-methyl
  source 1..18: mol_type = other RNA
ggtaagttctgtccaagc

SEQ ID NO: 13228 - RNA, 18 nt, synthetic construct
  misc_feature 1..18: note = Description of Artificial Sequence: Synthetic Antisense oligonucleotide
  modified_base 1: mod_base = OTHER; note = bicyclic nucleic acid (BNA)
  modified_base 11: mod_base = OTHER; note = bicyclic nucleic acid (BNA)
  modified_base 14: mod_base = OTHER; note = bicyclic nucleic acid (BNA)
  modified_base 18: mod_base = OTHER; note = bicyclic nucleic acid (BNA)
  modified_base 9: mod_base = OTHER; note = 5-methyl
  modified_base 13..14: mod_base = OTHER; note = 5-methyl
  modified_base 18: mod_base = OTHER; note = 5-methyl
  source 1..18: mol_type = other RNA
ggtaagttctgtccaagc

SEQ ID NO: 13229 - RNA, 18 nt, synthetic construct
  misc_feature 1..18: note = Description of Artificial Sequence: Synthetic Antisense oligonucleotide
  modified_base 1: mod_base = OTHER; note = bicyclic nucleic acid (BNA)
  modified_base 6: mod_base = OTHER; note = bicyclic nucleic acid (BNA)
  modified_base 11: mod_base = OTHER; note = bicyclic nucleic acid (BNA)
  modified_base 18: mod_base = OTHER; note = bicyclic nucleic acid (BNA)
  modified_base 9: mod_base = OTHER; note = 5-methyl
  modified_base 13..14: mod_base = OTHER; note = 5-methyl
  modified_base 18: mod_base = OTHER; note = 5-methyl
  source 1..18: mol_type = other RNA
ggtaagttctgtccaagc

SEQ ID NO: 13230 - RNA, 18 nt, synthetic construct
  misc_feature 1..18: note = Description of Artificial Sequence: Synthetic Antisense oligonucleotide
  modified_base 1..2: mod_base = OTHER; note = bicyclic nucleic acid (BNA)
  modified_base 13: mod_base = OTHER; note = bicyclic nucleic acid (BNA)
  modified_base 18: mod_base = OTHER; note = bicyclic nucleic acid (BNA)
  modified_base 9: mod_base = OTHER; note = 5-methyl
  modified_base 13..14: mod_base = OTHER; note = 5-methyl
  modified_base 18: mod_base = OTHER; note = 5-methyl
  source 1..18: mol_type = other RNA
ggtaagttctgtccaagc

SEQ ID NO: 13231 - RNA, 18 nt, synthetic construct
  misc_feature 1..18: note = Description of Artificial Sequence: Synthetic Antisense oligonucleotide
  modified_base 1: mod_base = OTHER; note = bicyclic nucleic acid (BNA)
  modified_base 9: mod_base = OTHER; note = bicyclic nucleic acid (BNA)
  modified_base 13: mod_base = OTHER; note = bicyclic nucleic acid (BNA)
  modified_base 18: mod_base = OTHER; note = bicyclic nucleic acid (BNA)
  modified_base 9: mod_base = OTHER; note = 5-methyl
  modified_base 13..14: mod_base = OTHER; note = 5-methyl
  modified_base 18: mod_base = OTHER; note = 5-methyl
  source 1..18: mol_type = other RNA
ggtaagttctgtccaagc

SEQ ID NO: 13232 - RNA, 18 nt, synthetic construct
  misc_feature 1..18: note = Description of Artificial Sequence: Synthetic Antisense oligonucleotide
  modified_base 1: mod_base = OTHER; note = bicyclic nucleic acid (BNA)
  modified_base 6: mod_base = OTHER; note = bicyclic nucleic acid (BNA)
  modified_base 17..18: mod_base = OTHER; note = bicyclic nucleic acid (BNA)
  modified_base 9: mod_base = OTHER; note = 5-methyl
  modified_base 13..14: mod_base = OTHER; note = 5-methyl
  modified_base 18: mod_base = OTHER; note = 5-methyl
  source 1..18: mol_type = other RNA
ggtaagttctgtccaagc

SEQ ID NO: 13233 - RNA, 18 nt, synthetic construct
  misc_feature 1..18: note = Description of Artificial Sequence: Synthetic Antisense oligonucleotide
  modified_base 1: mod_base = OTHER; note = bicyclic nucleic acid (BNA)
  modified_base 11: mod_base = OTHER; note = bicyclic nucleic acid (BNA)
  modified_base 17..18: mod_base = OTHER; note = bicyclic nucleic acid (BNA)
  modified_base 9: mod_base = OTHER; note = 5-methyl
  modified_base 13..14: mod_base = OTHER; note = 5-methyl
  modified_base 18: mod_base = OTHER; note = 5-methyl
  source 1..18: mol_type = other RNA
ggtaagttctgtccaagc

SEQ ID NO: 13234 - RNA, 18 nt, synthetic construct
  misc_feature 1..18: note = Description of Artificial Sequence: Synthetic Antisense oligonucleotide
  modified_base 1..2: mod_base = OTHER; note = bicyclic nucleic acid (BNA)
  modified_base 9: mod_base = OTHER; note = bicyclic nucleic acid (BNA)
  modified_base 18: mod_base = OTHER; note = bicyclic nucleic acid (BNA)
  modified_base 9: mod_base = OTHER; note = 5-methyl
  modified_base 13..14: mod_base = OTHER; note = 5-methyl
  modified_base 18: mod_base = OTHER; note = 5-methyl
  source 1..18: mol_type = other RNA
ggtaagttctgtccaagc

SEQ ID NO: 13235 - RNA, 18 nt, synthetic construct
  misc_feature 1..18: note = Description of Artificial Sequence: Synthetic Antisense oligonucleotide
  modified_base 1: mod_base = OTHER; note = bicyclic nucleic acid (BNA)
  modified_base 12: mod_base = OTHER; note = bicyclic nucleic acid (BNA)
  modified_base 17..18: mod_base = OTHER; note = bicyclic nucleic acid (BNA)
  modified_base 8: mod_base = OTHER; note = 5-methyl
  modified_base 12..13: mod_base = OTHER; note = 5-methyl
  modified_base 17..18: mod_base = OTHER; note = 5-methyl
  source 1..18: mol_type = other RNA
gtaagttctgtccaagcc

SEQ ID NO: 13236 - RNA, 18 nt, synthetic construct
  misc_feature 1..18: note = Description of Artificial Sequence: Synthetic Antisense oligonucleotide
  modified_base 1: mod_base = OTHER; note = bicyclic nucleic acid (BNA)
  modified_base 5: mod_base = OTHER; note = bicyclic nucleic acid (BNA)
  modified_base 8: mod_base = OTHER; note = bicyclic nucleic acid (BNA)
  modified_base 18: mod_base = OTHER; note = bicyclic nucleic acid (BNA)
  modified_base 8: mod_base = OTHER; note = 5-methyl
  modified_base 12..13: mod_base = OTHER; note = 5-methyl
  modified_base 17..18: mod_base = OTHER; note = 5-methyl
  source 1..18: mol_type = other RNA
gtaagttctgtccaagcc

SEQ ID NO: 13237 - RNA, 18 nt, synthetic construct
  misc_feature 1..18: note = Description of Artificial Sequence: Synthetic Antisense oligonucleotide
  modified_base 1: mod_base = OTHER; note = bicyclic nucleic acid (BNA)
  modified_base 8: mod_base = OTHER; note = bicyclic nucleic acid (BNA)
  modified_base 13: mod_base = OTHER; note = bicyclic nucleic acid (BNA)
  modified_base 18: mod_base = OTHER; note = bicyclic nucleic acid (BNA)
  modified_base 8: mod_base = OTHER; note = 5-methyl
  modified_base 12..13: mod_base = OTHER; note = 5-methyl
  modified_base 17..18: mod_base = OTHER; note = 5-methyl
  source 1..18: mol_type = other RNA
gtaagttctgtccaagcc

SEQ ID NO: 13238 - RNA, 18 nt, synthetic construct
  misc_feature 1..18: note = Description of Artificial Sequence: Synthetic Antisense oligonucleotide
  modified_base 1: mod_base = OTHER; note = bicyclic nucleic acid (BNA)
  modified_base 5: mod_base = OTHER; note = bicyclic nucleic acid (BNA)
  modified_base 13: mod_base = OTHER; note = bicyclic nucleic acid (BNA)
  modified_base 18: mod_base = OTHER; note = bicyclic nucleic acid (BNA)
  modified_base 8: mod_base = OTHER; note = 5-methyl
  modified_base 12..13: mod_base = OTHER; note = 5-methyl
  modified_base 17..18: mod_base = OTHER; note = 5-methyl
  source 1..18: mol_type = other RNA
gtaagttctgtccaagcc

SEQ ID NO: 13239 - RNA, 18 nt, synthetic construct
  misc_feature 1..18: note = Description of Artificial Sequence: Synthetic Antisense oligonucleotide
  modified_base 1: mod_base = OTHER; note = bicyclic nucleic acid (BNA)
  modified_base 8: mod_base = OTHER; note = bicyclic nucleic acid (BNA)
  modified_base 17..18: mod_base = OTHER; note = bicyclic nucleic acid (BNA)
  modified_base 8: mod_base = OTHER; note = 5-methyl
  modified_base 12..13: mod_base = OTHER; note = 5-methyl
  modified_base 17..18: mod_base = OTHER; note = 5-methyl
  source 1..18: mol_type = other RNA
gtaagttctgtccaagcc

SEQ ID NO: 13240 - RNA, 18 nt, synthetic construct
  misc_feature 1..18: note = Description of Artificial Sequence: Synthetic Antisense oligonucleotide
  modified_base 1: mod_base = OTHER; note = bicyclic nucleic acid (BNA)
  modified_base 13: mod_base = OTHER; note = bicyclic nucleic acid (BNA)
  modified_base 17..18: mod_base = OTHER; note = bicyclic nucleic acid (BNA)
  modified_base 8: mod_base = OTHER; note = 5-methyl
  modified_base 12..13: mod_base = OTHER; note = 5-methyl
  modified_base 17..18: mod_base = OTHER; note = 5-methyl
  source 1..18: mol_type = other RNA
gtaagttctgtccaagcc

SEQ ID NO: 13241 - RNA, 18 nt, synthetic construct
  misc_feature 1..18: note = Description of Artificial Sequence: Synthetic Antisense oligonucleotide
  modified_base 1: mod_base = OTHER; note = bicyclic nucleic acid (BNA)
  modified_base 8: mod_base = OTHER; note = bicyclic nucleic acid (BNA)
  modified_base 12: mod_base = OTHER; note = bicyclic nucleic acid (BNA)
  modified_base 18: mod_base = OTHER; note = bicyclic nucleic acid (BNA)
  modified_base 8: mod_base = OTHER; note = 5-methyl
  modified_base 12..13: mod_base = OTHER; note = 5-methyl
  modified_base 17..18: mod_base = OTHER; note = 5-methyl
  source 1..18: mol_type = other RNA
gtaagttctgtccaagcc

SEQ ID NO: 13242 - RNA, 18 nt, synthetic construct
  misc_feature 1..18: note = Description of Artificial Sequence: Synthetic Antisense oligonucleotide
  modified_base 1: mod_base = OTHER; note = bicyclic nucleic acid (BNA)
  modified_base 5: mod_base = OTHER; note = bicyclic nucleic acid (BNA)
  modified_base 10: mod_base = OTHER; note = bicyclic nucleic acid (BNA)
  modified_base 18: mod_base = OTHER; note = bicyclic nucleic acid (BNA)
  modified_base 8: mod_base = OTHER; note = 5-methyl
  modified_base 12..13: mod_base = OTHER; note = 5-methyl
  modified_base 17..18: mod_base = OTHER; note = 5-methyl
  source 1..18: mol_type = other RNA
gtaagttctgtccaagcc

SEQ ID NO: 13243 - RNA, 18 nt, synthetic construct
  misc_feature 1..18: note = Description of Artificial Sequence: Synthetic Antisense oligonucleotide
  modified_base 1: mod_base = OTHER; note = bicyclic nucleic acid (BNA)
  modified_base 8: mod_base = OTHER; note = bicyclic nucleic acid (BNA)
  modified_base 16: mod_base = OTHER; note = bicyclic nucleic acid (BNA)
  modified_base 18: mod_base = OTHER; note = bicyclic nucleic acid (BNA)
  modified_base 8: mod_base = OTHER; note = 5-methyl
  modified_base 12..13: mod_base = OTHER; note = 5-methyl
  modified_base 17..18: mod_base = OTHER; note = 5-methyl
  source 1..18: mol_type = other RNA
gtaagttctgtccaagcc

SEQ ID NO: 13244 - RNA, 18 nt, synthetic construct
  misc_feature 1..18: note = Description of Artificial Sequence: Synthetic Antisense oligonucleotide
  modified_base 1: mod_base = OTHER; note = bicyclic nucleic acid (BNA)
  modified_base 10: mod_base = OTHER; note = bicyclic nucleic acid (BNA)
  modified_base 16: mod_base = OTHER; note = bicyclic nucleic acid (BNA)
  modified_base 18: mod_base = OTHER; note = bicyclic nucleic acid (BNA)
  modified_base 8: mod_base = OTHER; note = 5-methyl
  modified_base 12..13: mod_base = OTHER; note = 5-methyl
  modified_base 17..18: mod_base = OTHER; note = 5-methyl
  source 1..18: mol_type = other RNA
gtaagttctgtccaagcc

SEQ ID NO: 13245 - RNA, 18 nt, synthetic construct
  misc_feature 1..18: note = Description of Artificial Sequence: Synthetic Antisense oligonucleotide
  modified_base 1: mod_base = OTHER; note = bicyclic nucleic acid (BNA)
  modified_base 10: mod_base = OTHER; note = bicyclic nucleic acid (BNA)
  modified_base 12: mod_base = OTHER; note = bicyclic nucleic acid (BNA)
  modified_base 18: mod_base = OTHER; note = bicyclic nucleic acid (BNA)
  modified_base 8: mod_base = OTHER; note = 5-methyl
  modified_base 12..13: mod_base = OTHER; note = 5-methyl
  modified_base 17..18: mod_base = OTHER; note = 5-methyl
  source 1..18: mol_type = other RNA
gtaagttctgtccaagcc

SEQ ID NO: 13246 - RNA, 18 nt, synthetic construct
  misc_feature 1..18: note = Description of Artificial Sequence: Synthetic Antisense oligonucleotide
  modified_base 1: mod_base = OTHER; note = bicyclic nucleic acid (BNA)
  modified_base 5: mod_base = OTHER; note = bicyclic nucleic acid (BNA)
  modified_base 17..18: mod_base = OTHER; note = bicyclic nucleic acid (BNA)
  modified_base 8: mod_base = OTHER; note = 5-methyl
  modified_base 12..13: mod_base = OTHER; note = 5-methyl
  modified_base 17..18: mod_base = OTHER; note = 5-methyl
  source 1..18: mol_type = other RNA
gtaagttctgtccaagcc

SEQ ID NO: 13247 - RNA, 18 nt, synthetic construct
  misc_feature 1..18: note = Description of Artificial Sequence: Synthetic Antisense oligonucleotide
  modified_base 1: mod_base = OTHER; note = bicyclic nucleic acid (BNA)
  modified_base 10: mod_base = OTHER; note = bicyclic nucleic acid (BNA)
  modified_base 17..18: mod_base = OTHER; note = bicyclic nucleic acid (BNA)
  modified_base 8: mod_base = OTHER; note = 5-methyl
  modified_base 12..13: mod_base = OTHER; note = 5-methyl
  modified_base 17..18: mod_base = OTHER; note = 5-methyl
  source 1..18: mol_type = other RNA
gtaagttctgtccaagcc

SEQ ID NO: 13248 - RNA, 18 nt, synthetic construct
  misc_feature 1..18: note = Description of Artificial Sequence: Synthetic Antisense oligonucleotide
  modified_base 1: mod_base = OTHER; note = bicyclic nucleic acid (BNA)
  modified_base 12..13: mod_base = OTHER; note = bicyclic nucleic acid (BNA)
  modified_base 18: mod_base = OTHER; note = bicyclic nucleic acid (BNA)
  modified_base 8: mod_base = OTHER; note = 5-methyl
  modified_base 12..13: mod_base = OTHER; note = 5-methyl
  modified_base 17..18: mod_base = OTHER; note = 5-methyl
  source 1..18: mol_type = other RNA
gtaagttctgtccaagcc

SEQ ID NO: 13249 - RNA, 18 nt, synthetic construct
  misc_feature 1..18: note = Description of Artificial Sequence: Synthetic Antisense oligonucleotide
  modified_base 1: mod_base = OTHER; note = bicyclic nucleic acid (BNA)
  modified_base 5: mod_base = OTHER; note = bicyclic nucleic acid (BNA)
  modified_base 12: mod_base = OTHER; note = bicyclic nucleic acid (BNA)
  modified_base 18: mod_base = OTHER; note = bicyclic nucleic acid (BNA)
  modified_base 8: mod_base = OTHER; note = 5-methyl
  modified_base 12..13: mod_base = OTHER; note = 5-methyl
  modified_base 17..18: mod_base = OTHER; note = 5-methyl
  source 1..18: mol_type = other RNA
gtaagttctgtccaagcc

SEQ ID NO: 13250 - RNA, 18 nt, synthetic construct
  misc_feature 1..18: note = Description of Artificial Sequence: Synthetic Antisense oligonucleotide
  modified_base 1: mod_base = OTHER; note = bicyclic nucleic acid (BNA)
  modified_base 8: mod_base = OTHER; note = bicyclic nucleic acid (BNA)
  modified_base 10: mod_base = OTHER; note = bicyclic nucleic acid (BNA)
  modified_base 18: mod_base = OTHER; note = bicyclic nucleic acid (BNA)
  modified_base 8: mod_base = OTHER; note = 5-methyl
  modified_base 12..13: mod_base = OTHER; note = 5-methyl
  modified_base 17..18: mod_base = OTHER; note = 5-methyl
  source 1..18: mol_type = other RNA
gtaagttctgtccaagcc

SEQ ID NO: 13251 - RNA, 18 nt, synthetic construct
  misc_feature 1..18: note = Description of Artificial Sequence: Synthetic Antisense oligonucleotide
  modified_base 1: mod_base = OTHER; note = bicyclic nucleic acid (BNA)
  modified_base 13: mod_base = OTHER; note = bicyclic nucleic acid (BNA)
  modified_base 16: mod_base = OTHER; note = bicyclic nucleic acid (BNA)
  modified_base 18: mod_base = OTHER; note = bicyclic nucleic acid (BNA)
  modified_base 8: mod_base = OTHER; note = 5-methyl
  modified_base 12..13: mod_base = OTHER; note = 5-methyl
  modified_base 17..18: mod_base = OTHER; note = 5-methyl
  source 1..18: mol_type = other RNA
gtaagttctgtccaagcc

SEQ ID NO: 13252 - RNA, 18 nt, synthetic construct
  misc_feature 1..18: note = Description of Artificial Sequence: Synthetic Antisense oligonucleotide
  modified_base 1: mod_base = OTHER; note = bicyclic nucleic acid (BNA)
  modified_base 5: mod_base = OTHER; note = bicyclic nucleic acid (BNA)
  modified_base 16: mod_base = OTHER; note = bicyclic nucleic acid (BNA)
  modified_base 18: mod_base = OTHER; note = bicyclic nucleic acid (BNA)
  modified_base 8: mod_base = OTHER; note = 5-methyl
  modified_base 12..13: mod_base = OTHER; note = 5-methyl
  modified_base 17..18: mod_base = OTHER; note = 5-methyl
  source 1..18: mol_type = other RNA
gtaagttctgtccaagcc

SEQ ID NO: 13253 - RNA, 18 nt, synthetic construct
  misc_feature 1..18: note = Description of Artificial Sequence: Synthetic Antisense oligonucleotide
  modified_base 1: mod_base = OTHER; note = bicyclic nucleic acid (BNA)
  modified_base 12: mod_base = OTHER; note = bicyclic nucleic acid (BNA)
  modified_base 16: mod_base = OTHER; note = bicyclic nucleic acid (BNA)
  modified_base 18: mod_base = OTHER; note = bicyclic nucleic acid (BNA)
  modified_base 8: mod_base = OTHER; note = 5-methyl
  modified_base 12..13: mod_base = OTHER; note = 5-methyl
  modified_base 17..18: mod_base = OTHER; note = 5-methyl
  source 1..18: mol_type = other RNA
gtaagttctgtccaagcc

SEQ ID NO: 13254 - RNA, 18 nt, synthetic construct
  misc_feature 1..18: note = Description of Artificial Sequence: Synthetic Antisense oligonucleotide
  modified_base 1: mod_base = OTHER; note = bicyclic nucleic acid (BNA)
  modified_base 16..18: mod_base = OTHER; note = bicyclic nucleic acid (BNA)
  modified_base 8: mod_base = OTHER; note = 5-methyl
  modified_base 12..13: mod_base = OTHER; note = 5-methyl
  modified_base 17..18: mod_base = OTHER; note = 5-methyl
  source 1..18: mol_type = other RNA
gtaagttctgtccaagcc

SEQ ID NO: 13255 - RNA, 18 nt, synthetic construct
  misc_feature 1..18: note = Description of Artificial Sequence: Synthetic Antisense oligonucleotide
  modified_base 1: mod_base = OTHER; note = bicyclic nucleic acid (BNA)
  modified_base 10: mod_base = OTHER; note = bicyclic nucleic acid (BNA)
  modified_base 13: mod_base = OTHER; note = bicyclic nucleic acid (BNA)
  modified_base 18: mod_base = OTHER; note = bicyclic nucleic acid (BNA)
  modified_base 8: mod_base = OTHER; note = 5-methyl
  modified_base 12..13: mod_base = OTHER; note = 5-methyl
  modified_base 17..18: mod_base = OTHER; note = 5-methyl
  source 1..18: mol_type = other RNA
gtaagttctgtccaagcc

SEQ ID NO: 13256 - RNA, 18 nt, synthetic construct
  misc_feature 1..18: note = Description of Artificial Sequence: Synthetic Antisense oligonucleotide
  modified_base 1: mod_base = OTHER; note = bicyclic nucleic acid (BNA)
  modified_base 6: mod_base = OTHER; note = bicyclic nucleic acid (BNA)
  modified_base 10: mod_base = OTHER; note = bicyclic nucleic acid (BNA)
  modified_base 18: mod_base = OTHER; note = bicyclic nucleic acid (BNA)
  modified_base 4: mod_base = OTHER; note = 5-methyl
  modified_base 13: mod_base = OTHER; note = 5-methyl
  modified_base 17..18: mod_base = OTHER; note = 5-methyl
  source 1..18: mol_type = other RNA
agtcggtaagttctgtcc

SEQ ID NO: 13257 - RNA, 18 nt, synthetic construct
  misc_feature 1..18: note = Description of Artificial Sequence: Synthetic Antisense oligonucleotide
  modified_base 1..2: mod_base = OTHER; note = bicyclic nucleic acid (BNA)
  modified_base 4: mod_base = OTHER; note = bicyclic nucleic acid (BNA)
  modified_base 18: mod_base = OTHER; note = bicyclic nucleic acid (BNA)
  modified_base 4: mod_base = OTHER; note = 5-methyl
  modified_base 13: mod_base = OTHER; note = 5-methyl
  modified_base 17..18: mod_base = OTHER; note = 5-methyl
  source 1..18: mol_type = other RNA
agtcggtaagttctgtcc

SEQ ID NO: 13258 - RNA, 18 nt, synthetic construct
  misc_feature 1..18: note = Description of Artificial Sequence: Synthetic Antisense oligonucleotide
  modified_base 1: mod_base = OTHER; note = bicyclic nucleic acid (BNA)
  modified_base 5: mod_base = OTHER; note = bicyclic nucleic acid (BNA)
  modified_base 13: mod_base = OTHER; note = bicyclic nucleic acid (BNA)
  modified_base 18: mod_base = OTHER; note = bicyclic nucleic acid (BNA)
  modified_base 4: mod_base = OTHER; note = 5-methyl
  modified_base 13: mod_base = OTHER; note = 5-methyl
  modified_base 17..18: mod_base = OTHER; note = 5-methyl
  source 1..18: mol_type = other RNA
agtcggtaagttctgtcc

SEQ ID NO: 13259 - RNA, 18 nt, synthetic construct
  misc_feature 1..18: note = Description of Artificial Sequence: Synthetic Antisense oligonucleotide
  modified_base 1: mod_base = OTHER; note = bicyclic nucleic acid (BNA)
  modified_base 13: mod_base = OTHER; note = bicyclic nucleic acid (BNA)
  modified_base 17..18: mod_base = OTHER; note = bicyclic nucleic acid (BNA)
  modified_base 4: mod_base = OTHER; note = 5-methyl
  modified_base 13: mod_base = OTHER; note = 5-methyl
  modified_base 17..18: mod_base = OTHER; note = 5-methyl
  source 1..18: mol_type = other RNA
agtcggtaagttctgtcc

SEQ ID NO: 13260 - RNA, 18 nt, synthetic construct
  misc_feature 1..18: note = Description of Artificial Sequence: Synthetic Antisense oligonucleotide
  modified_base 1: mod_base = OTHER; note = bicyclic nucleic acid (BNA)
  modified_base 4: mod_base = OTHER; note = bicyclic nucleic acid (BNA)
  modified_base 15: mod_base = OTHER; note = bicyclic nucleic acid (BNA)
  modified_base 18: mod_base = OTHER; note = bicyclic nucleic acid (BNA)
  modified_base 4: mod_base = OTHER; note = 5-methyl
  modified_base 13: mod_base = OTHER; note = 5-methyl
  modified_base 17..18: mod_base = OTHER; note = 5-methyl
  source 1..18: mol_type = other RNA
agtcggtaagttctgtcc

SEQ ID NO: 13261 - RNA, 18 nt, synthetic construct
  misc_feature 1..18: note = Description of Artificial Sequence: Synthetic Antisense oligonucleotide
  modified_base 1: mod_base = OTHER; note = bicyclic nucleic acid (BNA)
  modified_base 5: mod_base = OTHER; note = bicyclic nucleic acid (BNA)
  modified_base 10: mod_base = OTHER; note = bicyclic nucleic acid (BNA)
  modified_base 18: mod_base = OTHER; note = bicyclic nucleic acid (BNA)
  modified_base 4: mod_base = OTHER; note = 5-methyl
  modified_base 13: mod_base = OTHER; note = 5-methyl
  modified_base 17..18: mod_base = OTHER; note = 5-methyl
  source 1..18: mol_type = other RNA
agtcggtaagttctgtcc

SEQ ID NO: 13262 - RNA, 18 nt, synthetic construct
  misc_feature 1..18: note = Description of Artificial Sequence: Synthetic Antisense oligonucleotide
  modified_base 1..2: mod_base = OTHER; note = bicyclic nucleic acid (BNA)
  modified_base 17..18: mod_base = OTHER; note = bicyclic nucleic acid (BNA)
  modified_base 4: mod_base = OTHER; note = 5-methyl
  modified_base 13: mod_base = OTHER; note = 5-methyl
  modified_base 17..18: mod_base = OTHER; note = 5-methyl
  source 1..18: mol_type = other RNA
agtcggtaagttctgtcc

SEQ ID NO: 13263 - RNA, 18 nt, synthetic construct
  misc_feature 1..18: note = Description of Artificial Sequence: Synthetic Antisense oligonucleotide
  modified_base 1: mod_base = OTHER; note = bicyclic nucleic acid (BNA)
  modified_base 6: mod_base = OTHER; note = bicyclic nucleic acid (BNA)
  modified_base 13: mod_base = OTHER; note = bicyclic nucleic acid (BNA)
  modified_base 18: mod_base = OTHER; note = bicyclic nucleic acid (BNA)
  modified_base 4: mod_base = OTHER; note = 5-methyl
  modified_base 13: mod_base = OTHER; note = 5-methyl
  modified_base 17..18: mod_base = OTHER; note = 5-methyl
  source 1..18: mol_type = other RNA
agtcggtaagttctgtcc

SEQ ID NO: 13264 - RNA, 18 nt, synthetic construct
  misc_feature 1..18: note = Description of Artificial Sequence: Synthetic Antisense oligonucleotide
  modified_base 1..2: mod_base = OTHER; note = bicyclic nucleic acid (BNA)
  modified_base 15: mod_base = OTHER; note = bicyclic nucleic acid (BNA)
  modified_base 18: mod_base = OTHER; note = bicyclic nucleic acid (BNA)
  modified_base 4: mod_base = OTHER; note = 5-methyl
  modified_base 13: mod_base = OTHER; note = 5-methyl
  modified_base 17..18: mod_base = OTHER; note = 5-methyl
  source 1..18: mol_type = other RNA
agtcggtaagttctgtcc

SEQ ID NO: 13265 - RNA, 18 nt, synthetic construct
  misc_feature 1..18: note = Description of Artificial Sequence: Synthetic Antisense oligonucleotide
  modified_base 1..2: mod_base = OTHER; note = bicyclic nucleic acid (BNA)
  modified_base 6: mod_base = OTHER; note = bicyclic nucleic acid (BNA)
  modified_base 18: mod_base = OTHER; note = bicyclic nucleic acid (BNA)
  modified_base 4: mod_base = OTHER; note = 5-methyl
  modified_base 13: mod_base = OTHER; note = 5-methyl
  modified_base 17..18: mod_base = OTHER; note = 5-methyl
  source 1..18: mol_type = other RNA
agtcggtaagttctgtcc

SEQ ID NO: 13266 - RNA, 18 nt, synthetic construct
  misc_feature 1..18: note = Description of Artificial Sequence: Synthetic Antisense oligonucleotide
  modified_base 1: mod_base = OTHER; note = bicyclic nucleic acid (BNA)
  modified_base 4: mod_base = OTHER; note = bicyclic nucleic acid (BNA)
  modified_base 17..18: mod_base = OTHER; note = bicyclic nucleic acid (BNA)
  modified_base 4: mod_base = OTHER; note = 5-methyl
  modified_base 13: mod_base = OTHER; note = 5-methyl
  modified_base 17..18: mod_base = OTHER; note = 5-methyl
  source 1..18: mol_type = other RNA
agtcggtaagttctgtcc

SEQ ID NO: 13267 - RNA, 18 nt, synthetic construct
  misc_feature 1..18: note = Description of Artificial Sequence: Synthetic Antisense oligonucleotide
  modified_base 1: mod_base = OTHER; note = bicyclic nucleic acid (BNA)
  modified_base 10: mod_base = OTHER; note = bicyclic nucleic acid (BNA)
  modified_base 15: mod_base = OTHER; note = bicyclic nucleic acid (BNA)
  modified_base 18: mod_base = OTHER; note = bicyclic nucleic acid (BNA)
  modified_base 4: mod_base = OTHER; note = 5-methyl
  modified_base 13: mod_base = OTHER; note = 5-methyl
  modified_base 17..18: mod_base = OTHER; note = 5-methyl
  source 1..18: mol_type = other RNA
agtcggtaagttctgtcc

SEQ ID NO: 13268 - RNA, 18 nt, synthetic construct
  misc_feature 1..18: note = Description of Artificial Sequence: Synthetic Antisense oligonucleotide
  modified_base 1: mod_base = OTHER; note = bicyclic nucleic acid (BNA)
  modified_base 13: mod_base = OTHER; note = bicyclic nucleic acid (BNA)
  modified_base 15: mod_base = OTHER; note = bicyclic nucleic acid (BNA)
  modified_base 18: mod_base = OTHER; note = bicyclic nucleic acid (BNA)
  modified_base 4: mod_base = OTHER; note = 5-methyl
  modified_base 13: mod_base = OTHER; note = 5-methyl
  modified_base 17..18: mod_base = OTHER; note = 5-methyl
  source 1..18: mol_type = other RNA
agtcggtaagttctgtcc

SEQ ID NO: 13269 - RNA, 18 nt, synthetic construct
  misc_feature 1..18: note = Description of Artificial Sequence: Synthetic Antisense oligonucleotide
  modified_base 1: mod_base = OTHER; note = bicyclic nucleic acid (BNA)
  modified_base 5..6: mod_base = OTHER; note = bicyclic nucleic acid (BNA)
  modified_base 18: mod_base = OTHER; note = bicyclic nucleic acid (BNA)
  modified_base 4: mod_base = OTHER; note = 5-methyl
  modified_base 13: mod_base = OTHER; note = 5-methyl
  modified_base 17..18: mod_base = OTHER; note = 5-methyl
  source 1..18: mol_type = other RNA
agtcggtaagttctgtcc

SEQ ID NO: 13270 - RNA, 18 nt, synthetic construct
  misc_feature 1..18: note = Description of Artificial Sequence: Synthetic Antisense oligonucleotide
  modified_base 1: mod_base = OTHER; note = bicyclic nucleic acid (BNA)
  modified_base 5: mod_base = OTHER; note = bicyclic nucleic acid (BNA)
  modified_base 15: mod_base = OTHER; note = bicyclic nucleic acid (BNA)
  modified_base 18: mod_base = OTHER; note = bicyclic nucleic acid (BNA)
  modified_base 4: mod_base = OTHER; note = 5-methyl
  modified_base 13: mod_base = OTHER; note = 5-methyl
  modified_base 17..18: mod_base = OTHER; note = 5-methyl
  source 1..18: mol_type = other RNA
agtcggtaagttctgtcc

SEQ ID NO: 13271 - RNA, 18 nt, synthetic construct
  misc_feature 1..18: note = Description of Artificial Sequence: Synthetic Antisense oligonucleotide
  modified_base 1..2: mod_base = OTHER; note = bicyclic nucleic acid (BNA)
  modified_base 5: mod_base = OTHER; note = bicyclic nucleic acid (BNA)
  modified_base 18: mod_base = OTHER; note = bicyclic nucleic acid (BNA)
  modified_base 4: mod_base = OTHER; note = 5-methyl
  modified_base 13: mod_base = OTHER; note = 5-methyl
  modified_base 17..18: mod_base = OTHER; note = 5-methyl
  source 1..18: mol_type = other RNA
agtcggtaagttctgtcc

SEQ ID NO: 13272 - RNA, 18 nt, synthetic construct
  misc_feature 1..18: note = Description of Artificial Sequence: Synthetic Antisense oligonucleotide
  modified_base 1: mod_base = OTHER; note = bicyclic nucleic acid (BNA)
  modified_base 5: mod_base = OTHER; note = bicyclic nucleic acid (BNA)
  modified_base 17..18: mod_base = OTHER; note = bicyclic nucleic acid (BNA)
  modified_base 4: mod_base = OTHER; note = 5-methyl
  modified_base 13: mod_base = OTHER; note = 5-methyl
  modified_base 17..18: mod_base = OTHER; note = 5-methyl
  source 1..18: mol_type = other RNA
agtcggtaagttctgtcc

SEQ ID NO: 13273 - RNA, 18 nt, synthetic construct
  misc_feature 1..18: note = Description of Artificial Sequence: Synthetic Antisense oligonucleotide
  modified_base 1: mod_base = OTHER; note = bicyclic nucleic acid (BNA)
  modified_base 10: mod_base = OTHER; note = bicyclic nucleic acid (BNA)
  modified_base 17..18: mod_base = OTHER; note = bicyclic nucleic acid (BNA)
  modified_base 4: mod_base = OTHER; note = 5-methyl
  modified_base 13: mod_base = OTHER; note = 5-methyl
  modified_base 17..18: mod_base = OTHER; note = 5-methyl
  source 1..18: mol_type = other RNA
agtcggtaagttctgtcc

SEQ ID NO: 13274 - RNA, 18 nt, synthetic construct
  misc_feature 1..18: note = Description of Artificial Sequence: Synthetic Antisense oligonucleotide
  modified_base 1: mod_base = OTHER; note = bicyclic nucleic acid (BNA)
  modified_base 4: mod_base = OTHER; note = bicyclic nucleic acid (BNA)
  modified_base 10: mod_base = OTHER; note = bicyclic nucleic acid (BNA)
  modified_base 18: mod_base = OTHER; note = bicyclic nucleic acid (BNA)
  modified_base 4: mod_base = OTHER; note = 5-methyl
  modified_base 13: mod_base = OTHER; note = 5-methyl
  modified_base 17..18: mod_base = OTHER; note = 5-methyl
  source 1..18: mol_type = other RNA
agtcggtaagttctgtcc

SEQ ID NO: 13275 - RNA, 18 nt, synthetic construct
  misc_feature 1..18: note = Description of Artificial Sequence: Synthetic Antisense oligonucleotide
  modified_base 1..2: mod_base = OTHER; note = bicyclic nucleic acid (BNA)
  modified_base 10: mod_base = OTHER; note = bicyclic nucleic acid (BNA)
  modified_base 18: mod_base = OTHER; note = bicyclic nucleic acid (BNA)
  modified_base 4: mod_base = OTHER; note = 5-methyl
  modified_base 13: mod_base = OTHER; note = 5-methyl
  modified_base 17..18: mod_base = OTHER; note = 5-methyl
  source 1..18: mol_type = other RNA
agtcggtaagttctgtcc

SEQ ID NO: 13276 - RNA, 18 nt, synthetic construct
  misc_feature 1..18: note = Description of Artificial Sequence: Synthetic Antisense oligonucleotide
  modified_base 1: mod_base = OTHER; note = bicyclic nucleic acid (BNA)
  modified_base 4: mod_base = OTHER; note = bicyclic nucleic acid (BNA)
  modified_base 6: mod_base = OTHER; note = bicyclic nucleic acid (BNA)
  modified_base 18: mod_base = OTHER; note = bicyclic nucleic acid (BNA)
  modified_base 4: mod_base = OTHER; note = 5-methyl
  modified_base 13: mod_base = OTHER; note = 5-methyl
  modified_base 17..18: mod_base = OTHER; note = 5-methyl
  source 1..18: mol_type = other RNA
agtcggtaagttctgtcc

SEQ ID NO: 13277 - RNA, 18 nt, synthetic construct
  misc_feature 1..18: note = Description of Artificial Sequence: Synthetic Antisense oligonucleotide
  modified_base 1: mod_base = OTHER; note = bicyclic nucleic acid (BNA)
  modified_base 4: mod_base = OTHER; note = bicyclic nucleic acid (BNA)
  modified_base 13: mod_base = OTHER; note = bicyclic nucleic acid (BNA)
  modified_base 18: mod_base = OTHER; note = bicyclic nucleic acid (BNA)
  modified_base 4: mod_base = OTHER; note = 5-methyl
  modified_base 13: mod_base = OTHER; note = 5-methyl
  modified_base 17..18: mod_base = OTHER; note = 5-methyl
  source 1..18: mol_type = other RNA
agtcggtaagttctgtcc

SEQ ID NO: 13278 - RNA, 18 nt, synthetic construct
  misc_feature 1..18: note = Description of Artificial Sequence: Synthetic Antisense oligonucleotide
  modified_base 1: mod_base = OTHER; note = bicyclic nucleic acid (BNA)
  modified_base 15: mod_base = OTHER; note = bicyclic nucleic acid (BNA)
  modified_base 17..18: mod_base = OTHER; note = bicyclic nucleic acid (BNA)
  modified_base 4: mod_base = OTHER; note = 5-methyl
  modified_base 13: mod_base = OTHER; note = 5-methyl
  modified_base 17..18: mod_base = OTHER; note = 5-methyl
  source 1..18: mol_type = other RNA
agtcggtaagttctgtcc

SEQ ID NO: 13279 - RNA, 18 nt, synthetic construct
  misc_feature 1..18: note = Description of Artificial Sequence: Synthetic Antisense oligonucleotide
  modified_base 1..2: mod_base = OTHER; note = bicyclic nucleic acid (BNA)
  modified_base 13: mod_base = OTHER; note = bicyclic nucleic acid (BNA)
  modified_base 18: mod_base = OTHER; note = bicyclic nucleic acid (BNA)
  modified_base 4: mod_base = OTHER; note = 5-methyl
  modified_base 13: mod_base = OTHER; note = 5-methyl
  modified_base 17..18: mod_base = OTHER; note = 5-methyl
  source 1..18: mol_type = other RNA
agtcggtaagttctgtcc

SEQ ID NO: 13280 - RNA, 18 nt, synthetic construct
  misc_feature 1..18: note = Description of Artificial Sequence: Synthetic Antisense oligonucleotide
  modified_base 1: mod_base = OTHER; note = bicyclic nucleic acid (BNA)
  modified_base 6: mod_base = OTHER; note = bicyclic nucleic acid (BNA)
  modified_base 17..18: mod_base = OTHER; note = bicyclic nucleic acid (BNA)
  modified_base 4: mod_base = OTHER; note = 5-methyl
  modified_base 13: mod_base = OTHER; note = 5-methyl
  modified_base 17..18: mod_base = OTHER; note = 5-methyl
  source 1..18: mol_type = other RNA
agtcggtaagttctgtcc

SEQ ID NO: 13281 - RNA, 18 nt, synthetic construct
  misc_feature 1..18: note = Description of Artificial Sequence: Synthetic Antisense oligonucleotide
  modified_base 1: mod_base = OTHER; note = bicyclic nucleic acid (BNA)
  modified_base 6: mod_base = OTHER; note = bicyclic nucleic acid (BNA)
  modified_base 15: mod_base = OTHER; note = bicyclic nucleic acid (BNA)
  modified_base 18: mod_base = OTHER; note = bicyclic nucleic acid (BNA)
  modified_base 4: mod_base = OTHER; note = 5-methyl
  modified_base 13: mod_base = OTHER; note = 5-methyl
  modified_base 17..18: mod_base = OTHER; note = 5-methyl
  source 1..18: mol_type = other RNA
agtcggtaagttctgtcc

SEQ ID NO: 13282 - RNA, 18 nt, synthetic construct
  misc_feature 1..18: note = Description of Artificial Sequence: Synthetic Antisense oligonucleotide
  modified_base 1: mod_base = OTHER; note = bicyclic nucleic acid (BNA)
  modified_base 4..5: mod_base = OTHER; note = bicyclic nucleic acid (BNA)
  modified_base 18: mod_base = OTHER; note = bicyclic nucleic acid (BNA)
  modified_base 4: mod_base = OTHER; note = 5-methyl
  modified_base 13: mod_base = OTHER; note = 5-methyl
  modified_base 17..18: mod_base = OTHER; note = 5-methyl
  source 1..18: mol_type = other RNA
agtcggtaagttctgtcc

SEQ ID NO: 13283 - RNA, 18 nt, synthetic construct
  misc_feature 1..18: note = Description of Artificial Sequence: Synthetic Antisense oligonucleotide
  modified_base 1: mod_base = OTHER; note = bicyclic nucleic acid (BNA)
  modified_base 10: mod_base = OTHER; note = bicyclic nucleic acid (BNA)
  modified_base 13: mod_base = OTHER; note = bicyclic nucleic acid (BNA)
  modified_base 18: mod_base = OTHER; note = bicyclic nucleic acid (BNA)
  modified_base 4: mod_base = OTHER; note = 5-methyl
  modified_base 13: mod_base = OTHER; note = 5-methyl
  modified_base 17..18: mod_base = OTHER; note = 5-methyl
  source 1..18: mol_type = other RNA
agtcggtaagttctgtcc

SEQ ID NO: 13284 - RNA, 18 nt, synthetic construct
  misc_feature 1..18: note = Description of Artificial Sequence: Synthetic Antisense oligonucleotide
  modified_base 1: mod_base = OTHER; note = 5-methyl
  modified_base 5..6: mod_base = OTHER; note = 5-methyl
  modified_base 10..12: mod_base = OTHER; note = 5-methyl
  modified_base 1: mod_base = OTHER; note = bicyclic nucleic acid (BNA)
  modified_base 12: mod_base = OTHER; note = bicyclic nucleic acid (BNA)
  modified_base 17..18: mod_base = OTHER; note = bicyclic nucleic acid (BNA)
  source 1..18: mol_type = other RNA
ctgtccaagcccggttga

SEQ ID NO: 13285 - RNA, 18 nt, synthetic construct
  misc_feature 1..18: note = Description of Artificial Sequence: Synthetic Antisense oligonucleotide
  modified_base 1: mod_base = OTHER; note = 5-methyl
  modified_base 5..6: mod_base = OTHER; note = 5-methyl
  modified_base 10..12: mod_base = OTHER; note = 5-methyl
  modified_base 1: mod_base = OTHER; note = bicyclic nucleic acid (BNA)
  modified_base 6: mod_base = OTHER; note = bicyclic nucleic acid (BNA)
  modified_base 10: mod_base = OTHER; note = bicyclic nucleic acid (BNA)
  modified_base 18: mod_base = OTHER; note = bicyclic nucleic acid (BNA)
  source 1..18: mol_type = other RNA
ctgtccaagcccggttga

SEQ ID NO: 13286 - RNA, 18 nt, synthetic construct
  misc_feature 1..18: note = Description of Artificial Sequence: Synthetic Antisense oligonucleotide
  modified_base 1: mod_base = OTHER; note = 5-methyl
  modified_base 5..6: mod_base = OTHER; note = 5-methyl
  modified_base 10..12: mod_base = OTHER; note = 5-methyl
  modified_base 1: mod_base = OTHER; note = bicyclic nucleic acid (BNA)
  modified_base 9: mod_base = OTHER; note = bicyclic nucleic acid (BNA)
  modified_base 14: mod_base = OTHER; note = bicyclic nucleic acid (BNA)
  modified_base 18: mod_base = OTHER; note = bicyclic nucleic acid (BNA)
  source 1..18: mol_type = other RNA
ctgtccaagcccggttga

SEQ ID NO: 13287 - RNA, 18 nt, synthetic construct
  misc_feature 1..18: note = Description of Artificial Sequence: Synthetic Antisense oligonucleotide
  modified_base 1: mod_base = OTHER; note = 5-methyl
  modified_base 5..6: mod_base = OTHER; note = 5-methyl
  modified_base 10..12: mod_base = OTHER; note = 5-methyl
  modified_base 1: mod_base = OTHER; note = bicyclic nucleic acid (BNA)
  modified_base 11..12: mod_base = OTHER; note = bicyclic nucleic acid (BNA)
  modified_base 18: mod_base = OTHER; note = bicyclic nucleic acid (BNA)
  source 1..18: mol_type = other RNA
ctgtccaagcccggttga

SEQ ID NO: 13288 - RNA, 18 nt, synthetic construct
  misc_feature 1..18: note = Description of Artificial Sequence: Synthetic Antisense oligonucleotide
  modified_base 1: mod_base = OTHER; note = 5-methyl
  modified_base 5..6: mod_base = OTHER; note = 5-methyl
  modified_base 10..12: mod_base = OTHER; note = 5-methyl
  modified_base 1: mod_base = OTHER; note = bicyclic nucleic acid (BNA)
  modified_base 5: mod_base = OTHER; note = bicyclic nucleic acid (BNA)
  modified_base 9: mod_base = OTHER; note = bicyclic nucleic acid (BNA)
  modified_base 18: mod_base = OTHER; note = bicyclic nucleic acid (BNA)
  source 1..18: mol_type = other RNA
ctgtccaagcccggttga

SEQ ID NO: 13289 - RNA, 18 nt, synthetic construct
  misc_feature 1..18: note = Description of Artificial Sequence: Synthetic Antisense oligonucleotide
  modified_base 1: mod_base = OTHER; note = 5-methyl
  modified_base 5..6: mod_base = OTHER; note = 5-methyl
  modified_base 10..12: mod_base = OTHER; note = 5-methyl
  modified_base 1: mod_base = OTHER; note = bicyclic nucleic acid (BNA)
  modified_base 3: mod_base = OTHER; note = bicyclic nucleic acid (BNA)
  modified_base 9: mod_base = OTHER; note = bicyclic nucleic acid (BNA)
  modified_base 18: mod_base = OTHER; note = bicyclic nucleic acid (BNA)
  source 1..18: mol_type = other RNA
ctgtccaagcccggttga

SEQ ID NO: 13290 - RNA, 18 nt, synthetic construct
  misc_feature 1..18: note = Description of Artificial Sequence: Synthetic Antisense oligonucleotide
  modified_base 1: mod_base = OTHER; note = 5-methyl
  modified_base 5..6: mod_base = OTHER; note = 5-methyl
  modified_base 10..12: mod_base = OTHER; note = 5-methyl
  modified_base 1: mod_base = OTHER; note = bicyclic nucleic acid (BNA)
  modified_base 6: mod_base = OTHER; note = bicyclic nucleic acid (BNA)
  modified_base 14: mod_base = OTHER; note = bicyclic nucleic acid (BNA)
  modified_base 18: mod_base = OTHER; note = bicyclic nucleic acid (BNA)
  source 1..18: mol_type = other RNA
ctgtccaagcccggttga

SEQ ID NO: 13291 - RNA, 18 nt, synthetic construct
  misc_feature 1..18: note = Description of Artificial Sequence: Synthetic Antisense oligonucleotide
  modified_base 1: mod_base = OTHER; note = 5-methyl
  modified_base 5..6: mod_base = OTHER; note = 5-methyl
  modified_base 10..12: mod_base = OTHER; note = 5-methyl
  modified_base 1: mod_base = OTHER; note = bicyclic nucleic acid (BNA)
  modified_base 9..10: mod_base = OTHER; note = bicyclic nucleic acid (BNA)
  modified_base 18: mod_base = OTHER; note = bicyclic nucleic acid (BNA)
  source 1..18: mol_type = other RNA
ctgtccaagcccggttga

SEQ ID NO: 13292 - RNA, 18 nt, synthetic construct
  misc_feature 1..18: note = Description of Artificial Sequence: Synthetic Antisense oligonucleotide
  modified_base 1: mod_base = OTHER; note = 5-methyl
  modified_base 5..6: mod_base = OTHER; note = 5-methyl
  modified_base 10..12: mod_base = OTHER; note = 5-methyl
  modified_base 1: mod_base = OTHER; note = bicyclic nucleic acid (BNA)
  modified_base 5: mod_base = OTHER; note = bicyclic nucleic acid (BNA)
  modified_base 13: mod_base = OTHER; note = bicyclic nucleic acid (BNA)
  modified_base 18: mod_base = OTHER; note = bicyclic nucleic acid (BNA)
  source 1..18: mol_type = other RNA
ctgtccaagcccggttga

SEQ ID NO: 13293 - RNA, 18 nt, synthetic construct
  misc_feature 1..18: note = Description of Artificial Sequence: Synthetic Antisense oligonucleotide
  modified_base 1: mod_base = OTHER; note = 5-methyl
  modified_base 5..6: mod_base = OTHER; note = 5-methyl
  modified_base 10..12: mod_base = OTHER; note = 5-methyl
  modified_base 1: mod_base = OTHER; note = bicyclic nucleic acid (BNA)
  modified_base 3: mod_base = OTHER; note = bicyclic nucleic acid (BNA)
  modified_base 13: mod_base = OTHER; note = bicyclic nucleic acid (BNA)
  modified_base 18: mod_base = OTHER; note = bicyclic nucleic acid (BNA)
  source 1..18: mol_type = other RNA
ctgtccaagcccggttga

SEQ ID NO: 13294 - RNA, 18 nt, synthetic construct
  misc_feature 1..18: note = Description of Artificial Sequence: Synthetic Antisense oligonucleotide
  modified_base 1: mod_base = OTHER; note = 5-methyl
  modified_base 5..6: mod_base = OTHER; note = 5-methyl
  modified_base 10..12: mod_base = OTHER; note = 5-methyl
  modified_base 1: mod_base = OTHER; note = bicyclic nucleic acid (BNA)
  modified_base 13: mod_base = OTHER; note = bicyclic nucleic acid (BNA)
  modified_base 17..18: mod_base = OTHER; note = bicyclic nucleic acid (BNA)
  source 1..18: mol_type = other RNA
ctgtccaagcccggttga

SEQ ID NO: 13295 - RNA, 18 nt, synthetic construct
  misc_feature 1..18: note = Description of Artificial Sequence: Synthetic Antisense oligonucleotide
  modified_base 1: mod_base = OTHER; note = 5-methyl
  modified_base 5..6: mod_base = OTHER; note = 5-methyl
  modified_base 10..12: mod_base = OTHER; note = 5-methyl
  modified_base 1: mod_base = OTHER; note = bicyclic nucleic acid (BNA)
  modified_base 3: mod_base = OTHER; note = bicyclic nucleic acid (BNA)
  modified_base 6: mod_base = OTHER; note = bicyclic nucleic acid (BNA)
  modified_base 18: mod_base = OTHER; note = bicyclic nucleic acid (BNA)
  source 1..18: mol_type = other RNA
ctgtccaagcccggttga

SEQ ID NO: 13296 - RNA, 18 nt, synthetic construct
  misc_feature 1..18: note = Description of Artificial Sequence: Synthetic Antisense oligonucleotide
  modified_base 1: mod_base = OTHER; note = 5-methyl
  modified_base 5..6: mod_base = OTHER; note = 5-methyl
  modified_base 10..12: mod_base = OTHER; note = 5-methyl
  modified_base 1: mod_base = OTHER; note = bicyclic nucleic acid (BNA)
  modified_base 6: mod_base = OTHER; note = bicyclic nucleic acid (BNA)
  modified_base 9: mod_base = OTHER; note = bicyclic nucleic acid (BNA)
  modified_base 18: mod_base = OTHER; note = bicyclic nucleic acid (BNA)
  source 1..18: mol_type = other RNA
ctgtccaagcccggttga

SEQ ID NO: 13297 - RNA, 18 nt, synthetic construct
  misc_feature 1..18: note = Description of Artificial Sequence: Synthetic Antisense oligonucleotide
  modified_base 1: mod_base = OTHER; note = 5-methyl
  modified_base 5..6: mod_base = OTHER; note = 5-methyl
  modified_base 10..12: mod_base = OTHER; note = 5-methyl
  modified_base 1: mod_base = OTHER; note = bicyclic nucleic acid (BNA)
  modified_base 5: mod_base = OTHER; note = bicyclic nucleic acid (BNA)
  modified_base 10: mod_base = OTHER; note = bicyclic nucleic acid (BNA)
  modified_base 18: mod_base = OTHER; note = bicyclic nucleic acid (BNA)
  source 1..18: mol_type = other RNA
ctgtccaagcccggttga

SEQ ID NO: 13298 - RNA, 18 nt, synthetic construct
  misc_feature 1..18: note = Description of Artificial Sequence: Synthetic Antisense oligonucleotide
  modified_base 1: mod_base = OTHER; note = 5-methyl
  modified_base 5..6: mod_base = OTHER; note = 5-methyl
  modified_base 10..12: mod_base = OTHER; note = 5-methyl
  modified_base 1: mod_base = OTHER; note = bicyclic nucleic acid (BNA)
  modified_base 3: mod_base = OTHER; note = bicyclic nucleic acid (BNA)
  modified_base 10: mod_base = OTHER; note = bicyclic nucleic acid (BNA)
  modified_base 18: mod_base = OTHER; note = bicyclic nucleic acid (BNA)
  source 1..18: mol_type = other RNA
ctgtccaagcccggttga

SEQ ID NO: 13299 - RNA, 18 nt, synthetic construct
  misc_feature 1..18: note = Description of Artificial Sequence: Synthetic Antisense oligonucleotide
  modified_base 1: mod_base = OTHER; note = 5-methyl
  modified_base 5..6: mod_base = OTHER; note = 5-methyl
  modified_base 10..12: mod_base = OTHER; note = 5-methyl
  modified_base 1: mod_base = OTHER; note = bicyclic nucleic acid (BNA)
  modified_base 13..14: mod_base = OTHER; note = bicyclic nucleic acid (BNA)
  modified_base 18: mod_base = OTHER; note = bicyclic nucleic acid (BNA)
  source 1..18: mol_type = other RNA
ctgtccaagcccggttga

SEQ ID NO: 13300 - RNA, 18 nt, synthetic construct
  misc_feature 1..18: note = Description of Artificial Sequence: Synthetic Antisense oligonucleotide
  modified_base 1: mod_base = OTHER; note = 5-methyl
  modified_base 5..6: mod_base = OTHER; note = 5-methyl
  modified_base 10..12: mod_base = OTHER; note = 5-methyl
  modified_base 1: mod_base = OTHER; note = bicyclic nucleic acid (BNA)
  modified_base 6: mod_base = OTHER; note = bicyclic nucleic acid (BNA)
  modified_base 13: mod_base = OTHER; note = bicyclic nucleic acid (BNA)
  modified_base 18: mod_base = OTHER; note = bicyclic nucleic acid (BNA)
  source 1..18: mol_type = other RNA
ctgtccaagcccggttga

SEQ ID NO: 13301 - RNA, 18 nt, synthetic construct
  misc_feature 1..18: note = Description of Artificial Sequence: Synthetic Antisense oligonucleotide
  modified_base 1: mod_base = OTHER; note = 5-methyl
  modified_base 5..6: mod_base = OTHER; note = 5-methyl
  modified_base 10..12: mod_base = OTHER; note = 5-methyl
  modified_base 1: mod_base = OTHER; note = bicyclic nucleic acid (BNA)
  modified_base 9: mod_base = OTHER; note = bicyclic nucleic acid (BNA)
  modified_base 11: mod_base = OTHER; note = bicyclic nucleic acid (BNA)
  modified_base 18: mod_base = OTHER; note = bicyclic nucleic acid (BNA)
  source 1..18: mol_type = other RNA
ctgtccaagcccggttga

SEQ ID NO: 13302 - RNA, 18 nt, synthetic construct
  misc_feature 1..18: note = Description of Artificial Sequence: Synthetic Antisense oligonucleotide
  modified_base 1: mod_base = OTHER; note = 5-methyl
  modified_base 5..6: mod_base = OTHER; note = 5-methyl
  modified_base 10..12: mod_base = OTHER; note = 5-methyl
  modified_base 1: mod_base = OTHER; note = bicyclic nucleic acid (BNA)
  modified_base 14: mod_base = OTHER; note = bicyclic nucleic acid (BNA)
  modified_base 17..18: mod_base = OTHER; note = bicyclic nucleic acid (BNA)
  source 1..18: mol_type = other RNA
ctgtccaagcccggttga

SEQ ID NO: 13303 - RNA, 18 nt, synthetic construct
  misc_feature 1..18: note = Description of Artificial Sequence: Synthetic Antisense oligonucleotide
  modified_base 1: mod_base = OTHER; note = 5-methyl
  modified_base 5..6: mod_base = OTHER; note = 5-methyl
  modified_base 10..12: mod_base = OTHER; note = 5-methyl
  modified_base 1: mod_base = OTHER; note = bicyclic nucleic acid (BNA)
  modified_base 11: mod_base = OTHER; note = bicyclic nucleic acid (BNA)
  modified_base 13: mod_base = OTHER; note = bicyclic nucleic acid (BNA)
  modified_base 18: mod_base = OTHER; note = bicyclic nucleic acid (BNA)
  source 1..18: mol_type = other RNA
ctgtccaagcccggttga

SEQ ID NO: 13304 - RNA, 18 nt, synthetic construct
  misc_feature 1..18: note = Description of Artificial Sequence: Synthetic Antisense oligonucleotide
  modified_base 1: mod_base = OTHER; note = 5-methyl
  modified_base 5..6: mod_base = OTHER; note = 5-methyl
  modified_base 10..12: mod_base = OTHER; note = 5-methyl
  modified_base 1: mod_base = OTHER; note = bicyclic nucleic acid (BNA)
  modified_base 5: mod_base = OTHER; note = bicyclic nucleic acid (BNA)
  modified_base 14: mod_base = OTHER; note = bicyclic nucleic acid (BNA)
  modified_base 18: mod_base = OTHER; note = bicyclic nucleic acid (BNA)
  source 1..18: mol_type = other RNA
ctgtccaagcccggttga

SEQ ID NO: 13305 - RNA, 18 nt, synthetic construct
  misc_feature 1..18: note = Description of Artificial Sequence: Synthetic Antisense oligonucleotide
  modified_base 1: mod_base = OTHER; note = 5-methyl
  modified_base 5..6: mod_base = OTHER; note = 5-methyl
  modified_base 10..12: mod_base = OTHER; note = 5-methyl
  modified_base 1: mod_base = OTHER; note = bicyclic nucleic acid (BNA)
  modified_base 3: mod_base = OTHER; note = bicyclic nucleic acid (BNA)
  modified_base 14: mod_base = OTHER; note = bicyclic nucleic acid (BNA)
  modified_base 18: mod_base = OTHER; note = bicyclic nucleic acid (BNA)
  source 1..18: mol_type = other RNA
ctgtccaagcccggttga

SEQ ID NO: 13306 - RNA, 18 nt, synthetic construct
  misc_feature 1..18: note = Description of Artificial Sequence: Synthetic Antisense oligonucleotide
  modified_base 1: mod_base = OTHER; note = 5-methyl
  modified_base 5..6: mod_base = OTHER; note = 5-methyl
  modified_base 10..12: mod_base = OTHER; note = 5-methyl
  modified_base 1: mod_base = OTHER; note = bicyclic nucleic acid (BNA)
  modified_base 10: mod_base = OTHER; note = bicyclic nucleic acid (BNA)
  modified_base 12: mod_base = OTHER; note = bicyclic nucleic acid (BNA)
  modified_base 18: mod_base = OTHER; note = bicyclic nucleic acid (BNA)
  source 1..18: mol_type = other RNA
ctgtccaagcccggttga

SEQ ID NO: 13307 - RNA, 18 nt, synthetic construct
  misc_feature 1..18: note = Description of Artificial Sequence: Synthetic Antisense oligonucleotide
  modified_base 1: mod_base = OTHER; note = 5-methyl
  modified_base 5..6: mod_base = OTHER; note = 5-methyl
  modified_base 10..12: mod_base = OTHER; note = 5-methyl
  modified_base 1: mod_base = OTHER; note = bicyclic nucleic acid (BNA)
  modified_base 9: mod_base = OTHER; note = bicyclic nucleic acid (BNA)
  modified_base 17..18: mod_base = OTHER; note = bicyclic nucleic acid (BNA)
  source 1..18: mol_type = other RNA
ctgtccaagcccggttga

SEQ ID NO: 13308 - RNA, 18 nt, synthetic construct
  misc_feature 1..18: note = Description of Artificial Sequence: Synthetic Antisense oligonucleotide
  modified_base 1: mod_base = OTHER; note = 5-methyl
  modified_base 5..6: mod_base = OTHER; note = 5-methyl
  modified_base 10..12: mod_base = OTHER; note = 5-methyl
  modified_base 1: mod_base = OTHER; note = bicyclic nucleic acid (BNA)
  modified_base 12: mod_base = OTHER; note = bicyclic nucleic acid (BNA)
  modified_base 14: mod_base = OTHER; note = bicyclic nucleic acid (BNA)
  modified_base 18: mod_base = OTHER; note = bicyclic nucleic acid (BNA)
  source 1..18: mol_type = other RNA
ctgtccaagcccggttga

SEQ ID NO: 13309 - RNA, 18 nt, synthetic construct
  misc_feature 1..18: note = Description of Artificial Sequence: Synthetic Antisense oligonucleotide
  modified_base 1: mod_base = OTHER; note = 5-methyl
  modified_base 5..6: mod_base = OTHER; note = 5-methyl
  modified_base 10..12: mod_base = OTHER; note = 5-methyl
  modified_base 1: mod_base = OTHER; note = bicyclic nucleic acid (BNA)
  modified_base 5: mod_base = OTHER; note = bicyclic nucleic acid (BNA)
  modified_base 11: mod_base = OTHER; note = bicyclic nucleic acid (BNA)
  modified_base 18: mod_base = OTHER; note = bicyclic nucleic acid (BNA)
  source 1..18: mol_type = other RNA
ctgtccaagcccggttga

SEQ ID NO: 13310 - RNA, 18 nt, synthetic construct
  misc_feature 1..18: note = Description of Artificial Sequence: Synthetic Antisense oligonucleotide
  modified_base 1: mod_base = OTHER; note = 5-methyl
  modified_base 5..6: mod_base = OTHER; note = 5-methyl
  modified_base 10..12: mod_base = OTHER; note = 5-methyl
  modified_base 1: mod_base = OTHER; note = bicyclic nucleic acid (BNA)
  modified_base 3: mod_base = OTHER; note = bicyclic nucleic acid (BNA)
  modified_base 17..18: mod_base = OTHER; note = bicyclic nucleic acid (BNA)
  source 1..18: mol_type = other RNA
ctgtccaagcccggttga

SEQ ID NO: 13311 - RNA, 18 nt, synthetic construct
  misc_feature 1..18: note = Description of Artificial Sequence: Synthetic Antisense oligonucleotide
  modified_base 1: mod_base = OTHER; note = 5-methyl
  modified_base 5..6: mod_base = OTHER; note = 5-methyl
  modified_base 10..12: mod_base = OTHER; note = 5-methyl
  modified_base 1: mod_base = OTHER; note = bicyclic nucleic acid (BNA)
  modified_base 6: mod_base = OTHER; note = bicyclic nucleic acid (BNA)
  modified_base 12: mod_base = OTHER; note = bicyclic nucleic acid (BNA)
  modified_base 18: mod_base = OTHER; note = bicyclic nucleic acid (BNA)
  source 1..18: mol_type = other RNA
ctgtccaagcccggttga

SEQ ID NO: 13312 - RNA, 18 nt, synthetic construct
  misc_feature 1..18: note = Description of Artificial Sequence: Synthetic Antisense oligonucleotide
  modified_base 1: mod_base = OTHER; note = 5-methyl
  modified_base 5..6: mod_base = OTHER; note = 5-methyl
  modified_base 10..12: mod_base = OTHER; note = 5-methyl
  modified_base 1: mod_base = OTHER; note = bicyclic nucleic acid (BNA)
  modified_base 5..6: mod_base = OTHER; note = bicyclic nucleic acid (BNA)
  modified_base 18: mod_base = OTHER; note = bicyclic nucleic acid (BNA)
  source 1..18: mol_type = other RNA
ctgtccaagcccggttga

SEQ ID NO: 13313 - RNA, 18 nt, synthetic construct
  misc_feature 1..18: note = Description of Artificial Sequence: Synthetic Antisense oligonucleotide
  modified_base 1: mod_base = OTHER; note = 5-methyl
  modified_base 5..6: mod_base = OTHER; note = 5-methyl
  modified_base 10..12: mod_base = OTHER; note = 5-methyl
  modified_base 1: mod_base = OTHER; note = bicyclic nucleic acid (BNA)
  modified_base 11: mod_base = OTHER; note = bicyclic nucleic acid (BNA)
  modified_base 14: mod_base = OTHER; note = bicyclic nucleic acid (BNA)
  modified_base 18: mod_base = OTHER; note = bicyclic nucleic acid (BNA)
  source 1..18: mol_type = other RNA
ctgtccaagcccggttga

SEQ ID NO: 13314 - RNA, 18 nt, synthetic construct
  misc_feature 1..18: note = Description of Artificial Sequence: Synthetic Antisense oligonucleotide
  modified_base 1: mod_base = OTHER; note = 5-methyl
  modified_base 5..6: mod_base = OTHER; note = 5-methyl
  modified_base 10..12: mod_base = OTHER; note = 5-methyl
  modified_base 1: mod_base = OTHER; note = bicyclic nucleic acid (BNA)
  modified_base 9: mod_base = OTHER; note = bicyclic nucleic acid (BNA)
  modified_base 12: mod_base = OTHER; note = bicyclic nucleic acid (BNA)
  modified_base 18: mod_base = OTHER; note = bicyclic nucleic acid (BNA)
  source 1..18: mol_type = other RNA
ctgtccaagcccggttga

SEQ ID NO: 13315 - RNA, 18 nt, synthetic construct
  misc_feature 1..18: note = Description of Artificial Sequence: Synthetic Antisense oligonucleotide
  modified_base 1: mod_base = OTHER; note = 5-methyl
  modified_base 5..6: mod_base = OTHER; note = 5-methyl
  modified_base 10..12: mod_base = OTHER; note = 5-methyl
  modified_base 1: mod_base = OTHER; note = bicyclic nucleic acid (BNA)
  modified_base 5: mod_base = OTHER; note = bicyclic nucleic acid (BNA)
  modified_base 17..18: mod_base = OTHER; note = bicyclic nucleic acid (BNA)
  source 1..18: mol_type = other RNA
ctgtccaagcccggttga

SEQ ID NO: 13316 - RNA, 18 nt, synthetic construct
  misc_feature 1..18: note = Description of Artificial Sequence: Synthetic Antisense oligonucleotide
  modified_base 1: mod_base = OTHER; note = 5-methyl
  modified_base 5..6: mod_base = OTHER; note = 5-methyl
  modified_base 10..12: mod_base = OTHER; note = 5-methyl
  modified_base 1: mod_base = OTHER; note = bicyclic nucleic acid (BNA)
  modified_base 3: mod_base = OTHER; note = bicyclic nucleic acid (BNA)
  modified_base 11: mod_base = OTHER; note = bicyclic nucleic acid (BNA)
  modified_base 18: mod_base = OTHER; note = bicyclic nucleic acid (BNA)
  source 1..18: mol_type = other RNA
ctgtccaagcccggttga

SEQ ID NO: 13317 - RNA, 18 nt, synthetic construct
  misc_feature 1..18: note = Description of Artificial Sequence: Synthetic Antisense oligonucleotide
  modified_base 1: mod_base = OTHER; note = 5-methyl
  modified_base 5..6: mod_base = OTHER; note = 5-methyl
  modified_base 10..12: mod_base = OTHER; note = 5-methyl
  modified_base 1: mod_base = OTHER; note = bicyclic nucleic acid (BNA)
  modified_base 10..11: mod_base = OTHER; note = bicyclic nucleic acid (BNA)
  modified_base 18: mod_base = OTHER; note = bicyclic nucleic acid (BNA)
  source 1..18: mol_type = other RNA
ctgtccaagcccggttga

SEQ ID NO: 13318 - RNA, 18 nt, synthetic construct
  misc_feature 1..18: note = Description of Artificial Sequence: Synthetic Antisense oligonucleotide
  modified_base 1: mod_base = OTHER; note = 5-methyl
  modified_base 5..6: mod_base = OTHER; note = 5-methyl
  modified_base 10..12: mod_base = OTHER; note = 5-methyl
  modified_base 1: mod_base = OTHER; note = bicyclic nucleic acid (BNA)
  modified_base 10: mod_base = OTHER; note = bicyclic nucleic acid (BNA)
  modified_base 17..18: mod_base = OTHER; note = bicyclic nucleic acid (BNA)
  source 1..18: mol_type = other RNA
ctgtccaagcccggttga

SEQ ID NO: 13319 - RNA, 18 nt, synthetic construct
  misc_feature 1..18: note = Description of Artificial Sequence: Synthetic Antisense oligonucleotide
  modified_base 1: mod_base = OTHER; note = 5-methyl
  modified_base 5..6: mod_base = OTHER; note = 5-methyl
  modified_base 10..12: mod_base = OTHER; note = 5-methyl
  modified_base 1: mod_base = OTHER; note = bicyclic nucleic acid (BNA)
  modified_base 12..13: mod_base = OTHER; note = bicyclic nucleic acid (BNA)
  modified_base 18: mod_base = OTHER; note = bicyclic nucleic acid (BNA)
  source 1..18: mol_type = other RNA
ctgtccaagcccggttga

SEQ ID NO: 13320 - RNA, 18 nt, synthetic construct
  misc_feature 1..18: note = Description of Artificial Sequence: Synthetic Antisense oligonucleotide
  modified_base 1: mod_base = OTHER; note = 5-methyl
  modified_base 5..6: mod_base = OTHER; note = 5-methyl
  modified_base 10..12: mod_base = OTHER; note = 5-methyl
  modified_base 1: mod_base = OTHER; note = bicyclic nucleic acid (BNA)
  modified_base 5: mod_base = OTHER; note = bicyclic nucleic acid (BNA)
  modified_base 12: mod_base = OTHER; note = bicyclic nucleic acid (BNA)
  modified_base 18: mod_base = OTHER; note = bicyclic nucleic acid (BNA)
  source 1..18: mol_type = other RNA
ctgtccaagcccggttga

SEQ ID NO: 13321 - RNA, 18 nt, synthetic construct
  misc_feature 1..18: note = Description of Artificial Sequence: Synthetic Antisense oligonucleotide
  modified_base 1: mod_base = OTHER; note = 5-methyl
  modified_base 5..6: mod_base = OTHER; note = 5-methyl
  modified_base 10..12: mod_base = OTHER; note = 5-methyl
  modified_base 1: mod_base = OTHER; note = bicyclic nucleic acid (BNA)
  modified_base 10: mod_base = OTHER; note = bicyclic nucleic acid (BNA)
  modified_base 14: mod_base = OTHER; note = bicyclic nucleic acid (BNA)
  modified_base 18: mod_base = OTHER; note = bicyclic nucleic acid (BNA)
  source 1..18: mol_type = other RNA
ctgtccaagcccggttga

SEQ ID NO: 13322 - RNA, 18 nt, synthetic construct
  misc_feature 1..18: note = Description of Artificial Sequence: Synthetic Antisense oligonucleotide
  modified_base 1: mod_base = OTHER; note = 5-methyl
  modified_base 5..6: mod_base = OTHER; note = 5-methyl
  modified_base 10..12: mod_base = OTHER; note = 5-methyl
  modified_base 1: mod_base = OTHER; note = bicyclic nucleic acid (BNA)
  modified_base 6: mod_base = OTHER; note = bicyclic nucleic acid (BNA)
  modified_base 11: mod_base = OTHER; note = bicyclic nucleic acid (BNA)
  modified_base 18: mod_base = OTHER; note = bicyclic nucleic acid (BNA)
  source 1..18: mol_type = other RNA
ctgtccaagcccggttga

SEQ ID NO: 13323 - RNA, 18 nt, synthetic construct
  misc_feature 1..18: note = Description of Artificial Sequence: Synthetic Antisense oligonucleotide
  modified_base 1: mod_base = OTHER; note = 5-methyl
  modified_base 5..6: mod_base = OTHER; note = 5-methyl
  modified_base 10..12: mod_base = OTHER; note = 5-methyl
  modified_base 1: mod_base = OTHER; note = bicyclic nucleic acid (BNA)
  modified_base 6: mod_base = OTHER; note = bicyclic nucleic acid (BNA)
  modified_base 17..18: mod_base = OTHER; note = bicyclic nucleic acid (BNA)
  source 1..18: mol_type = other RNA
ctgtccaagcccggttga

SEQ ID NO: 13324 - RNA, 18 nt, synthetic construct
  misc_feature 1..18: note = Description of Artificial Sequence: Synthetic Antisense oligonucleotide
  modified_base 1: mod_base = OTHER; note = 5-methyl
  modified_base 5..6: mod_base = OTHER; note = 5-methyl
  modified_base 10..12: mod_base = OTHER; note = 5-methyl
  modified_base 1: mod_base = OTHER; note = bicyclic nucleic acid (BNA)
  modified_base 9: mod_base = OTHER; note = bicyclic nucleic acid (BNA)
  modified_base 13: mod_base = OTHER; note = bicyclic nucleic acid (BNA)
  modified_base 18: mod_base = OTHER; note = bicyclic nucleic acid (BNA)
  source 1..18: mol_type = other RNA
ctgtccaagcccggttga

SEQ ID NO: 13325 - RNA, 18 nt, synthetic construct
  misc_feature 1..18: note = Description of Artificial Sequence: Synthetic Antisense oligonucleotide
  modified_base 1: mod_base = OTHER; note = 5-methyl
  modified_base 5..6: mod_base = OTHER; note = 5-methyl
  modified_base 10..12: mod_base = OTHER; note = 5-methyl
  modified_base 1: mod_base = OTHER; note = bicyclic nucleic acid (BNA)
  modified_base 11: mod_base = OTHER; note = bicyclic nucleic acid (BNA)
  modified_base 17..18: mod_base = OTHER; note = bicyclic nucleic acid (BNA)
  source 1..18: mol_type = other RNA
ctgtccaagcccggttga

SEQ ID NO: 13326 - RNA, 18 nt, synthetic construct
  misc_feature 1..18: note = Description of Artificial Sequence: Synthetic Antisense oligonucleotide
  modified_base 1: mod_base = OTHER; note = 5-methyl
  modified_base 5..6: mod_base = OTHER; note = 5-methyl
  modified_base 10..12: mod_base = OTHER; note = 5-methyl
  modified_base 1: mod_base = OTHER; note = bicyclic nucleic acid (BNA)
  modified_base 3: mod_base = OTHER; note = bicyclic nucleic acid (BNA)
  modified_base 12: mod_base = OTHER; note = bicyclic nucleic acid (BNA)
  modified_base 18: mod_base = OTHER; note = bicyclic nucleic acid (BNA)
  source 1..18: mol_type = other RNA
ctgtccaagcccggttga

SEQ ID NO: 13327 - RNA, 18 nt, synthetic construct
  misc_feature 1..18: note = Description of Artificial Sequence: Synthetic Antisense oligonucleotide
  modified_base 1: mod_base = OTHER; note = 5-methyl
  modified_base 5..6: mod_base = OTHER; note = 5-methyl
  modified_base 10..12: mod_base = OTHER; note = 5-methyl
  modified_base 1: mod_base = OTHER; note = bicyclic nucleic acid (BNA)
  modified_base 3: mod_base = OTHER; note = bicyclic nucleic acid (BNA)
  modified_base 5: mod_base = OTHER; note = bicyclic nucleic acid (BNA)
  modified_base 18: mod_base = OTHER; note = bicyclic nucleic acid (BNA)
  source 1..18: mol_type = other RNA
ctgtccaagcccggttga

SEQ ID NO: 13328 - RNA, 18 nt, synthetic construct
  misc_feature 1..18: note = Description of Artificial Sequence: Synthetic Antisense oligonucleotide
  modified_base 1: mod_base = OTHER; note = 5-methyl
  modified_base 5..6: mod_base = OTHER; note = 5-methyl
  modified_base 10..12: mod_base = OTHER; note = 5-methyl
  modified_base 1: mod_base = OTHER; note = bicyclic nucleic acid (BNA)
  modified_base 10: mod_base = OTHER; note = bicyclic nucleic acid (BNA)
  modified_base 13: mod_base = OTHER; note = bicyclic nucleic acid (BNA)
  modified_base 18: mod_base = OTHER; note = bicyclic nucleic acid (BNA)
  source 1..18: mol_type = other RNA
ctgtccaagcccggttga

SEQ ID NO: 13329 - DNA, 20 bp, synthetic construct
  misc_feature 1..20: note = Description of Artificial Sequence: Synthetic Antisense oligonucleotide
  misc_feature 1..20: note = Original Sequence: tcaaggaagauggcauuuct
  modified_base 1..2: mod_base = OTHER; note = bicyclic nucleic acid (BNA)
  modified_base 20: mod_base = OTHER; note = bicyclic nucleic acid (BNA)
  modified_base 2: mod_base = OTHER; note = 5-methyl
  modified_base 14: mod_base = OTHER; note = 5-methyl
  modified_base 19: mod_base = OTHER; note = 5-methyl
  source 1..20: mol_type = other DNA
  modified_base 11: mod_base = OTHER; note = Uracil
  modified_base 16: mod_base = OTHER; note = Uracil
  modified_base 17: mod_base = OTHER; note = Uracil
  modified_base 18: mod_base = OTHER; note = Uracil
tcaaggaagatggcatttct

SEQ ID NO: 13330 - DNA, 20 bp, synthetic construct
  misc_feature 1..20: note = Description of Artificial Sequence: Synthetic Antisense oligonucleotide
  misc_feature 1..20: note = Original Sequence: tcaaggaagauggcauuuct
  modified_base 1: mod_base = OTHER; note = bicyclic nucleic acid (BNA)
  modified_base 9: mod_base = OTHER; note = bicyclic nucleic acid (BNA)
  modified_base 20: mod_base = OTHER; note = bicyclic nucleic acid (BNA)
  modified_base 2: mod_base = OTHER; note = 5-methyl
  modified_base 14: mod_base = OTHER; note = 5-methyl
  modified_base 19: mod_base = OTHER; note = 5-methyl
  source 1..20: mol_type = other DNA
  modified_base 11: mod_base = OTHER; note = Uracil
  modified_base 16: mod_base = OTHER; note = Uracil
  modified_base 17: mod_base = OTHER; note = Uracil
  modified_base 18: mod_base = OTHER; note = Uracil
tcaaggaagatggcatttct

SEQ ID NO: 13331 - DNA, 20 bp, synthetic construct
  misc_feature 1..20: note = Description of Artificial Sequence: Synthetic Antisense oligonucleotide
  misc_feature 1..20: note = Original Sequence: tcaaggaagauggcauuuct
  modified_base 1: mod_base = OTHER; note = bicyclic nucleic acid (BNA)
  modified_base 5: mod_base = OTHER; note = bicyclic nucleic acid (BNA)
  modified_base 20: mod_base = OTHER; note = bicyclic nucleic acid (BNA)
  modified_base 2: mod_base = OTHER; note = 5-methyl
  modified_base 14: mod_base = OTHER; note = 5-methyl
  modified_base 19: mod_base = OTHER; note = 5-methyl
  source 1..20: mol_type = other DNA
  modified_base 11: mod_base = OTHER; note = Uracil
  modified_base 16: mod_base = OTHER; note = Uracil
  modified_base 17: mod_base = OTHER; note = Uracil
  modified_base 18: mod_base = OTHER; note = Uracil
tcaaggaagatggcatttct

SEQ ID NO: 13332 - DNA, 20 bp, synthetic construct
  misc_feature 1..20: note = Description of Artificial Sequence: Synthetic Antisense oligonucleotide
  misc_feature 1..20: note = Original Sequence: tcaaggaagauggcauuuct
  modified_base 1: mod_base = OTHER; note = bicyclic nucleic acid (BNA)
  modified_base 6: mod_base = OTHER; note = bicyclic nucleic acid (BNA)
  modified_base 20: mod_base = OTHER; note = bicyclic nucleic acid (BNA)
  modified_base 2: mod_base = OTHER; note = 5-methyl
  modified_base 14: mod_base = OTHER; note = 5-methyl
  modified_base 19: mod_base = OTHER; note = 5-methyl
  source 1..20: mol_type = other DNA
  modified_base 11: mod_base = OTHER; note = Uracil
  modified_base 16: mod_base = OTHER; note = Uracil
  modified_base 17: mod_base = OTHER; note = Uracil
  modified_base 18: mod_base = OTHER; note = Uracil
tcaaggaagatggcatttct

SEQ ID NO: 13333 - DNA, 20 bp, synthetic construct
  misc_feature 1..20: note = Description of Artificial Sequence: Synthetic Antisense oligonucleotide
  misc_feature 1..20: note = Original Sequence: tcaaggaagauggcauuuct
  modified_base 1: mod_base = OTHER; note = bicyclic nucleic acid (BNA)
  modified_base 12: mod_base = OTHER; note = bicyclic nucleic acid (BNA)
  modified_base 20: mod_base = OTHER; note = bicyclic nucleic acid (BNA)
  modified_base 2: mod_base = OTHER; note = 5-methyl
  modified_base 14: mod_base = OTHER; note = 5-methyl
  modified_base 19: mod_base = OTHER; note = 5-methyl
  source 1..20: mol_type = other DNA
  modified_base 11: mod_base = OTHER; note = Uracil
  modified_base 16: mod_base = OTHER; note = Uracil
  modified_base 17: mod_base = OTHER; note = Uracil
  modified_base 18: mod_base = OTHER; note = Uracil
tcaaggaagatggcatttct

SEQ ID NO: 13334 - DNA, 20 bp, synthetic construct
  misc_feature 1..20: note = Description of Artificial Sequence: Synthetic Antisense oligonucleotide
  misc_feature 1..20: note = Original Sequence: tcaaggaagauggcauuuct
  modified_base 1: mod_base = OTHER; note = bicyclic nucleic acid (BNA)
  modified_base 13: mod_base = OTHER; note = bicyclic nucleic acid (BNA)
  modified_base 20: mod_base = OTHER; note = bicyclic nucleic acid (BNA)
  modified_base 2: mod_base = OTHER; note = 5-methyl
  modified_base 14: mod_base = OTHER; note = 5-methyl
  modified_base 19: mod_base = OTHER; note = 5-methyl
  source 1..20: mol_type = other DNA
  modified_base 11: mod_base = OTHER; note = Uracil
  modified_base 16: mod_base = OTHER; note = Uracil
  modified_base 17: mod_base = OTHER; note = Uracil
  modified_base 18: mod_base = OTHER; note = Uracil
tcaaggaagatggcatttct

SEQ ID NO: 13335 - DNA, 20 bp, synthetic construct
  misc_feature 1..20: note = Description of Artificial Sequence: Synthetic Antisense oligonucleotide
  misc_feature 1..20: note = Original Sequence: tcaaggaagauggcauuuct
  modified_base 1: mod_base = OTHER; note = bicyclic nucleic acid (BNA)
  modified_base 19..20: mod_base = OTHER; note = bicyclic nucleic acid (BNA)
  modified_base 2: mod_base = OTHER; note = 5-methyl
  modified_base 14: mod_base = OTHER; note = 5-methyl
  modified_base 19: mod_base = OTHER; note = 5-methyl
  source 1..20: mol_type = other DNA
  modified_base 11: mod_base = OTHER; note = Uracil
  modified_base 16: mod_base = OTHER; note = Uracil
  modified_base 17: mod_base = OTHER; note = Uracil
  modified_base 18: mod_base = OTHER; note = Uracil
tcaaggaagatggcatttct

SEQ ID NO: 13336 - DNA, 20 bp, synthetic construct
  misc_feature 1..20: note = Description of Artificial Sequence: Synthetic Antisense oligonucleotide
  misc_feature 1..20: note = Original Sequence: tcaaggaagauggcauuuct
  modified_base 1: mod_base = OTHER; note = bicyclic nucleic acid (BNA)
  modified_base 14: mod_base = OTHER; note = bicyclic nucleic acid (BNA)
  modified_base 20: mod_base = OTHER; note = bicyclic nucleic acid (BNA)
  modified_base 2: mod_base = OTHER; note = 5-methyl
  modified_base 14: mod_base = OTHER; note = 5-methyl
  modified_base 19: mod_base = OTHER; note = 5-methyl
  source 1..20: mol_type = other DNA
  modified_base 11: mod_base = OTHER; note = Uracil
  modified_base 16: mod_base = OTHER; note = Uracil
  modified_base 17: mod_base = OTHER; note = Uracil
  modified_base 18: mod_base = OTHER; note = Uracil
tcaaggaagatggcatttct

SEQ ID NO: 13337 - DNA, 22 bp, synthetic construct
  misc_feature 1..22: note = Description of Artificial Sequence: Synthetic Antisense oligonucleotide
  misc_feature 1..22: note = Original Sequence: tcaaggaagauggcauuucuag
  modified_base 1..2: mod_base = OTHER; note = bicyclic nucleic acid (BNA)
  modified_base 22: mod_base = OTHER; note = bicyclic nucleic acid (BNA)
  modified_base 2: mod_base = OTHER; note = 5-methyl
  modified_base 14: mod_base = OTHER; note = 5-methyl
  modified_base 19: mod_base = OTHER; note = 5-methyl
  source 1..22: mol_type = other DNA
  modified_base 11: mod_base = OTHER; note = Uracil
  modified_base 16: mod_base = OTHER; note = Uracil
  modified_base 17: mod_base = OTHER; note = Uracil
  modified_base 18: mod_base = OTHER; note = Uracil
  modified_base 20: mod_base = OTHER; note = Uracil
tcaaggaagatggcatttctag

SEQ ID NO: 13338 - DNA, 22 bp, synthetic construct
  misc_feature 1..22: note = Description of Artificial Sequence: Synthetic Antisense oligonucleotide
  misc_feature 1..22: note = Original Sequence: tcaaggaagauggcauuucuag
  modified_base 1: mod_base = OTHER; note = bicyclic nucleic acid (BNA)
  modified_base 9: mod_base = OTHER; note = bicyclic nucleic acid (BNA)
  modified_base 22: mod_base = OTHER; note = bicyclic nucleic acid (BNA)
  modified_base 2: mod_base = OTHER; note = 5-methyl
  modified_base 14: mod_base = OTHER; note = 5-methyl
  modified_base 19: mod_base = OTHER; note = 5-methyl
  source 1..22: mol_type = other DNA
  modified_base 11: mod_base = OTHER; note = Uracil
  modified_base 16: mod_base = OTHER; note = Uracil
  modified_base 17: mod_base = OTHER; note = Uracil
  modified_base 18: mod_base = OTHER; note = Uracil
  modified_base 20: mod_base = OTHER; note = Uracil
tcaaggaagatggcatttctag

SEQ ID NO: 13339 - DNA, 22 bp, synthetic construct
  misc_feature 1..22: note = Description of Artificial Sequence: Synthetic Antisense oligonucleotide
  misc_feature 1..22: note = Original Sequence: tcaaggaagauggcauuucuag
  modified_base 1: mod_base = OTHER; note = bicyclic nucleic acid (BNA)
  modified_base 5: mod_base = OTHER; note = bicyclic nucleic acid (BNA)
  modified_base 22: mod_base = OTHER; note = bicyclic nucleic acid (BNA)
  modified_base 2: mod_base = OTHER; note = 5-methyl
  modified_base 14: mod_base = OTHER; note = 5-methyl
  modified_base 19: mod_base = OTHER; note = 5-methyl
  source 1..22: mol_type = other DNA
  modified_base 11: mod_base = OTHER; note = Uracil
  modified_base 16: mod_base = OTHER; note = Uracil
  modified_base 17: mod_base = OTHER; note = Uracil
  modified_base 18: mod_base = OTHER; note = Uracil
  modified_base 20: mod_base = OTHER; note = Uracil
tcaaggaagatggcatttctag

SEQ ID NO: 13340 - DNA, 22 bp, synthetic construct
  misc_feature 1..22: note = Description of Artificial Sequence: Synthetic Antisense oligonucleotide
  misc_feature 1..22: note = Original Sequence: tcaaggaagauggcauuucuag
  modified_base 1: mod_base = OTHER; note = bicyclic nucleic acid (BNA)
  modified_base 6: mod_base = OTHER; note = bicyclic nucleic acid (BNA)
  modified_base 22: mod_base = OTHER; note = bicyclic nucleic acid (BNA)
  modified_base 2: mod_base = OTHER; note = 5-methyl
  modified_base 14: mod_base = OTHER; note = 5-methyl
  modified_base 19: mod_base = OTHER; note = 5-methyl
  source 1..22: mol_type = other DNA
  modified_base 11: mod_base = OTHER; note = Uracil
  modified_base 16: mod_base = OTHER; note = Uracil
  modified_base 17: mod_base = OTHER; note = Uracil
  modified_base 18: mod_base = OTHER; note = Uracil
  modified_base 20: mod_base = OTHER; note = Uracil
tcaaggaagatggcatttctag

SEQ ID NO: 13341 - DNA, 22 bp, synthetic construct
  misc_feature 1..22: note = Description of Artificial Sequence: Synthetic Antisense oligonucleotide
  misc_feature 1..22: note = Original Sequence: tcaaggaagauggcauuucuag
  modified_base 1: mod_base = OTHER; note = bicyclic nucleic acid (BNA)
  modified_base 12: mod_base = OTHER; note = bicyclic nucleic acid (BNA)
  modified_base 22: mod_base = OTHER; note = bicyclic nucleic acid (BNA)
  modified_base 2: mod_base = OTHER; note = 5-methyl
  modified_base 14: mod_base = OTHER; note = 5-methyl
  modified_base 19: mod_base = OTHER; note = 5-methyl
  source 1..22: mol_type = other DNA
  modified_base 11: mod_base = OTHER; note = Uracil
  modified_base 16: mod_base = OTHER; note = Uracil
  modified_base 17: mod_base = OTHER; note = Uracil
  modified_base 18: mod_base = OTHER; note = Uracil
  modified_base 20: mod_base = OTHER; note = Uracil
tcaaggaagatggcatttctag

SEQ ID NO: 13342 - DNA, 22 bp, synthetic construct
  misc_feature 1..22: note = Description of Artificial Sequence: Synthetic Antisense oligonucleotide
  misc_feature 1..22: note = Original Sequence: tcaaggaagauggcauuucuag
  modified_base 1: mod_base = OTHER; note = bicyclic nucleic acid (BNA)
  modified_base 13: mod_base = OTHER; note = bicyclic nucleic acid (BNA)
  modified_base 22: mod_base = OTHER; note = bicyclic nucleic acid (BNA)
  modified_base 2: mod_base = OTHER; note = 5-methyl
  modified_base 14: mod_base = OTHER; note = 5-methyl
  modified_base 19: mod_base = OTHER; note = 5-methyl
  source 1..22: mol_type = other DNA
  modified_base 11: mod_base = OTHER; note = Uracil
  modified_base 16: mod_base = OTHER; note = Uracil
  modified_base 17: mod_base = OTHER; note = Uracil
  modified_base 18: mod_base = OTHER; note = Uracil
  modified_base 20: mod_base = OTHER; note = Uracil
tcaaggaagatggcatttctag

SEQ ID NO: 13343 - DNA, 22 bp, synthetic construct
  misc_feature 1..22: note = Description of Artificial Sequence: Synthetic Antisense oligonucleotide
  misc_feature 1..22: note = Original Sequence: tcaaggaagauggcauuucuag
  modified_base 1: mod_base = OTHER; note = bicyclic nucleic acid (BNA)
  modified_base 19: mod_base = OTHER; note = bicyclic nucleic acid (BNA)
  modified_base 22: mod_base = OTHER; note = bicyclic nucleic acid (BNA)
  modified_base 2: mod_base = OTHER; note = 5-methyl
  modified_base 14: mod_base = OTHER; note = 5-methyl
  modified_base 19: mod_base = OTHER; note = 5-methyl
  source 1..22: mol_type = other DNA
  modified_base 11: mod_base = OTHER; note = Uracil
  modified_base 16: mod_base = OTHER; note = Uracil
  modified_base 17: mod_base = OTHER; note = Uracil
  modified_base 18: mod_base = OTHER; note = Uracil
  modified_base 20: mod_base = OTHER; note = Uracil
tcaaggaagatggcatttctag

SEQ ID NO: 13344 - DNA, 22 bp, synthetic construct
  misc_feature 1..22: note = Description of Artificial Sequence: Synthetic Antisense oligonucleotide
  misc_feature 1..22: note = Original Sequence: tcaaggaagauggcauuucuag
  modified_base 1: mod_base = OTHER; note = bicyclic nucleic acid (BNA)
  modified_base 14: mod_base = OTHER; note = bicyclic nucleic acid (BNA)
  modified_base 22: mod_base = OTHER; note = bicyclic nucleic acid (BNA)
  modified_base 2: mod_base = OTHER; note = 5-methyl
  modified_base 14: mod_base = OTHER; note = 5-methyl
  modified_base 19: mod_base = OTHER; note = 5-methyl
  source 1..22: mol_type = other DNA
  modified_base 11: mod_base = OTHER; note = Uracil
  modified_base 16: mod_base = OTHER; note = Uracil
  modified_base 17: mod_base = OTHER; note = Uracil
  modified_base 18: mod_base = OTHER; note = Uracil
  modified_base 20: mod_base = OTHER; note = Uracil
tcaaggaagatggcatttctag

SEQ ID NO: 13345 - DNA, 20 bp, synthetic construct
  misc_feature 1..20: note = Description of Artificial Sequence: Synthetic Antisense oligonucleotide
  misc_feature 1..20: note = Original Sequence: tcaaggaagauggcauuuct
  modified_base 1: mod_base = OTHER; note = bicyclic nucleic acid (BNA)
  modified_base 9: mod_base = OTHER; note = bicyclic nucleic acid (BNA)
  modified_base 14: mod_base = OTHER; note = bicyclic nucleic acid (BNA)
  modified_base 20: mod_base = OTHER; note = bicyclic nucleic acid (BNA)
  modified_base 2: mod_base = OTHER; note = 5-methyl
  modified_base 14: mod_base = OTHER; note = 5-methyl
  modified_base 19: mod_base = OTHER; note = 5-methyl
  source 1..20: mol_type = other DNA
  modified_base 11: mod_base = OTHER; note = Uracil
  modified_base 16: mod_base = OTHER; note = Uracil
  modified_base 17: mod_base = OTHER; note = Uracil
  modified_base 18: mod_base = OTHER; note = Uracil
tcaaggaagatggcatttct

SEQ ID NO: 13346 - DNA, 20 bp, synthetic construct
  misc_feature 1..20: note = Description of Artificial Sequence: Synthetic Antisense oligonucleotide
  misc_feature 1..20: note = Original Sequence: tcaaggaagauggcauuuct
  modified_base 1: mod_base = OTHER; note = bicyclic nucleic acid (BNA)
  modified_base 5: mod_base = OTHER; note = bicyclic nucleic acid (BNA)
  modified_base 9: mod_base = OTHER; note = bicyclic nucleic acid (BNA)
  modified_base 20: mod_base = OTHER; note = bicyclic nucleic acid (BNA)
  modified_base 2: mod_base = OTHER; note = 5-methyl
  modified_base 14: mod_base = OTHER; note = 5-methyl
  modified_base 19: mod_base = OTHER; note = 5-methyl
  source 1..20: mol_type = other DNA
  modified_base 11: mod_base = OTHER; note = Uracil
  modified_base 16: mod_base = OTHER; note = Uracil
  modified_base 17: mod_base = OTHER; note = Uracil
  modified_base 18: mod_base = OTHER; note = Uracil
tcaaggaagatggcatttct

SEQ ID NO: 13347 - DNA, 20 bp, synthetic construct
  misc_feature 1..20: note = Description of Artificial Sequence: Synthetic Antisense oligonucleotide
  misc_feature 1..20: note = Original Sequence: tcaaggaagauggcauuuct
  modified_base 1: mod_base = OTHER; note = bicyclic nucleic acid (BNA)
  modified_base 5: mod_base = OTHER; note = bicyclic nucleic acid (BNA)
  modified_base 19..20: mod_base = OTHER; note = bicyclic nucleic acid (BNA)
  modified_base 2: mod_base = OTHER; note = 5-methyl
  modified_base 14: mod_base = OTHER; note = 5-methyl
  modified_base 19: mod_base = OTHER; note = 5-methyl
  source 1..20: mol_type = other DNA
  modified_base 11: mod_base = OTHER; note = Uracil
  modified_base 16: mod_base = OTHER; note = Uracil
  modified_base 17: mod_base = OTHER; note = Uracil
  modified_base 18: mod_base = OTHER; note = Uracil
tcaaggaagatggcatttct

SEQ ID NO: 13348 - DNA, 20 bp, synthetic construct
  misc_feature 1..20: note = Description of Artificial Sequence: Synthetic Antisense oligonucleotide
  misc_feature 1..20: note = Original Sequence: tcaaggaagauggcauuuct
  modified_base 1: mod_base = OTHER; note = bicyclic nucleic acid (BNA)
  modified_base 6: mod_base = OTHER; note = bicyclic nucleic acid (BNA)
  modified_base 14: mod_base = OTHER; note = bicyclic nucleic acid (BNA)
  modified_base 20: mod_base = OTHER; note = bicyclic nucleic acid (BNA)
  modified_base 2: mod_base = OTHER; note = 5-methyl
  modified_base 14: mod_base = OTHER; note = 5-methyl
  modified_base 19: mod_base = OTHER; note = 5-methyl
  source 1..20: mol_type = other DNA
  modified_base 11: mod_base = OTHER; note = Uracil
  modified_base 16: mod_base = OTHER; note = Uracil
  modified_base 17: mod_base = OTHER; note = Uracil
  modified_base 18: mod_base = OTHER; note = Uracil
tcaaggaagatggcatttct

SEQ ID NO: 13349 - DNA, 20 bp, synthetic construct
  misc_feature 1..20: note = Description of Artificial Sequence: Synthetic Antisense oligonucleotide
  misc_feature 1..20: note = Original Sequence: tcaaggaagauggcauuuct
  modified_base 1: mod_base = OTHER; note = bicyclic nucleic acid (BNA)
  modified_base 5: mod_base = OTHER; note = bicyclic nucleic acid (BNA)
  modified_base 13: mod_base = OTHER; note = bicyclic nucleic acid (BNA)
  modified_base 20: mod_base = OTHER; note = bicyclic nucleic acid (BNA)
  modified_base 2: mod_base = OTHER; note = 5-methyl
  modified_base 14: mod_base = OTHER; note = 5-methyl
  modified_base 19: mod_base = OTHER; note = 5-methyl
  source 1..20: mol_type = other DNA
  modified_base 11: mod_base = OTHER; note = Uracil
  modified_base 16: mod_base = OTHER; note = Uracil
  modified_base 17: mod_base = OTHER; note = Uracil
  modified_base 18: mod_base = OTHER; note = Uracil
tcaaggaagatggcatttct

SEQ ID NO: 13350 - DNA, 20 bp, synthetic construct
  misc_feature 1..20: note = Description of Artificial Sequence: Synthetic Antisense oligonucleotide
  misc_feature 1..20: note = Original Sequence: tcaaggaagauggcauuuct
  modified_base 1..2: mod_base = OTHER; note = bicyclic nucleic acid (BNA)
  modified_base 12: mod_base = OTHER; note = bicyclic nucleic acid (BNA)
  modified_base 20: mod_base = OTHER; note = bicyclic nucleic acid (BNA)
  modified_base 2: mod_base = OTHER; note = 5-methyl
  modified_base 14: mod_base = OTHER; note = 5-methyl
  modified_base 19: mod_base = OTHER; note = 5-methyl
  source 1..20: mol_type = other DNA
  modified_base 11: mod_base = OTHER; note = Uracil
  modified_base 16: mod_base = OTHER; note = Uracil
  modified_base 17: mod_base = OTHER; note = Uracil
  modified_base 18: mod_base = OTHER; note = Uracil
tcaaggaagatggcatttct

SEQ ID NO: 13351 - DNA, 20 bp, synthetic construct
  misc_feature 1..20: note = Description of Artificial Sequence: Synthetic Antisense oligonucleotide
  misc_feature 1..20: note = Original Sequence: tcaaggaagauggcauuuct
  modified_base 1: mod_base = OTHER; note = bicyclic nucleic acid (BNA)
  modified_base 6: mod_base = OTHER; note = bicyclic nucleic acid (BNA)
  modified_base 9: mod_base = OTHER; note = bicyclic nucleic acid (BNA)
  modified_base 20: mod_base = OTHER; note = bicyclic nucleic acid (BNA)
  modified_base 2: mod_base = OTHER; note = 5-methyl
  modified_base 14: mod_base = OTHER; note = 5-methyl
  modified_base 19: mod_base = OTHER; note = 5-methyl
  source 1..20: mol_type = other DNA
  modified_base 11: mod_base = OTHER; note = Uracil
  modified_base 16: mod_base = OTHER; note = Uracil
  modified_base 17: mod_base = OTHER; note = Uracil
  modified_base 18: mod_base = OTHER; note = Uracil
tcaaggaagatggcatttct

SEQ ID NO: 13352 - DNA, 20 bp, synthetic construct
  misc_feature 1..20: note = Description of Artificial Sequence: Synthetic Antisense oligonucleotide
  misc_feature 1..20: note = Original Sequence: tcaaggaagauggcauuuct
  modified_base 1: mod_base = OTHER; note = bicyclic nucleic acid (BNA)
  modified_base 13..14: mod_base = OTHER; note = bicyclic nucleic acid (BNA)
  modified_base 20: mod_base = OTHER; note = bicyclic nucleic acid (BNA)
  modified_base 2: mod_base = OTHER; note = 5-methyl
  modified_base 14: mod_base = OTHER; note = 5-methyl
  modified_base 19: mod_base = OTHER; note = 5-methyl
  source 1..20: mol_type = other DNA
  modified_base 11: mod_base = OTHER; note = Uracil
  modified_base 16: mod_base = OTHER; note = Uracil
  modified_base 17: mod_base = OTHER; note = Uracil
  modified_base 18: mod_base = OTHER; note = Uracil
tcaaggaagatggcatttct

SEQ ID NO: 13353 - DNA, 20 bp, synthetic construct
  misc_feature 1..20: note = Description of Artificial Sequence: Synthetic Antisense oligonucleotide
  misc_feature 1..20: note = Original Sequence: tcaaggaagauggcauuuct
  modified_base 1: mod_base = OTHER; note = bicyclic nucleic acid (BNA)
  modified_base 6: mod_base = OTHER; note = bicyclic nucleic acid (BNA)
  modified_base 13: mod_base = OTHER; note = bicyclic nucleic acid (BNA)
  modified_base 20: mod_base = OTHER; note = bicyclic nucleic acid (BNA)
  modified_base 2: mod_base = OTHER; note = 5-methyl
  modified_base 14: mod_base = OTHER; note = 5-methyl
  modified_base 19: mod_base = OTHER; note = 5-methyl
  source 1..20: mol_type = other DNA
  modified_base 11: mod_base = OTHER; note = Uracil
  modified_base 16: mod_base = OTHER; note = Uracil
  modified_base 17: mod_base = OTHER; note = Uracil
  modified_base 18: mod_base = OTHER; note = Uracil
tcaaggaagatggcatttct

SEQ ID NO: 13354 - DNA, 20 bp, synthetic construct
  misc_feature 1..20: note = Description of Artificial Sequence: Synthetic Antisense oligonucleotide
  misc_feature 1..20: note = Original Sequence: tcaaggaagauggcauuuct
  modified_base 1: mod_base = OTHER; note = bicyclic nucleic acid (BNA)
  modified_base 6: mod_base = OTHER; note = bicyclic nucleic acid (BNA)
  modified_base 19..20: mod_base = OTHER; note = bicyclic nucleic acid (BNA)
  modified_base 2: mod_base = OTHER; note = 5-methyl
  modified_base 14: mod_base = OTHER; note = 5-methyl
  modified_base 19: mod_base = OTHER; note = 5-methyl
  source 1..20: mol_type = other DNA
  modified_base 11: mod_base = OTHER; note = Uracil
  modified_base 16: mod_base = OTHER; note = Uracil
  modified_base 17: mod_base = OTHER; note = Uracil
  modified_base 18: mod_base = OTHER; note = Uracil
tcaaggaagatggcatttct

SEQ ID NO: 13355 - DNA, 20 bp, synthetic construct
  misc_feature 1..20: note = Description of Artificial Sequence: Synthetic Antisense oligonucleotide
  misc_feature 1..20: note = Original Sequence: tcaaggaagauggcauuuct
  modified_base 1: mod_base = OTHER; note = bicyclic nucleic acid (BNA)
  modified_base 5: mod_base = OTHER; note = bicyclic nucleic acid (BNA)
  modified_base 14: mod_base = OTHER; note = bicyclic nucleic acid (BNA)
  modified_base 20: mod_base = OTHER; note = bicyclic nucleic acid (BNA)
  modified_base 2: mod_base = OTHER; note = 5-methyl
  modified_base 14: mod_base = OTHER; note = 5-methyl
  modified_base 19: mod_base = OTHER; note = 5-methyl
  source 1..20: mol_type = other DNA
  modified_base 11: mod_base = OTHER; note = Uracil
  modified_base 16: mod_base = OTHER; note = Uracil
  modified_base 17: mod_base = OTHER; note = Uracil
  modified_base 18: mod_base = OTHER; note = Uracil
tcaaggaagatggcatttct

SEQ ID NO: 13356 - DNA, 20 bp, synthetic construct
  misc_feature 1..20: note = Description of Artificial Sequence: Synthetic Antisense oligonucleotide
  misc_feature 1..20: note = Original Sequence: tcaaggaagauggcauuuct
  modified_base 1..2: mod_base = OTHER; note = bicyclic nucleic acid (BNA)
  modified_base 6: mod_base = OTHER; note = bicyclic nucleic acid (BNA)
  modified_base 20: mod_base = OTHER; note = bicyclic nucleic acid (BNA)
  modified_base 2: mod_base = OTHER; note = 5-methyl
  modified_base 14: mod_base = OTHER; note = 5-methyl
  modified_base 19: mod_base = OTHER; note = 5-methyl
  source 1..20: mol_type = other DNA
  modified_base 11: mod_base = OTHER; note = Uracil
  modified_base 16: mod_base = OTHER; note = Uracil
  modified_base 17: mod_base = OTHER; note = Uracil
  modified_base 18: mod_base = OTHER; note = Uracil
tcaaggaagatggcatttct

SEQ ID NO: 13357 - DNA, 20 bp, synthetic construct
  misc_feature 1..20: note = Description of Artificial Sequence: Synthetic Antisense oligonucleotide
  misc_feature 1..20: note = Original Sequence: tcaaggaagauggcauuuct
  modified_base 1: mod_base = OTHER; note = bicyclic nucleic acid (BNA)
  modified_base 12: mod_base = OTHER; note = bicyclic nucleic acid (BNA)
  modified_base 19..20: mod_base = OTHER; note = bicyclic nucleic acid (BNA)
  modified_base 2: mod_base = OTHER; note = 5-methyl
  modified_base 14: mod_base = OTHER; note = 5-methyl
  modified_base 19: mod_base = OTHER; note = 5-methyl
  source 1..20: mol_type = other DNA
  modified_base 11: mod_base = OTHER; note = Uracil
  modified_base 16: mod_base = OTHER; note = Uracil
  modified_base 17: mod_base = OTHER; note = Uracil
  modified_base 18: mod_base = OTHER; note = Uracil
tcaaggaagatggcatttct

SEQ ID NO: 13358 - DNA, 20 bp, synthetic construct
  misc_feature 1..20: note = Description of Artificial Sequence: Synthetic Antisense oligonucleotide
  misc_feature 1..20: note = Original Sequence: tcaaggaagauggcauuuct
  modified_base 1: mod_base = OTHER; note = bicyclic nucleic acid (BNA)
  modified_base 12: mod_base = OTHER; note = bicyclic nucleic acid (BNA)
  modified_base 14: mod_base = OTHER; note = bicyclic nucleic acid (BNA)
  modified_base 20: mod_base = OTHER; note = bicyclic nucleic acid (BNA)
  modified_base 2: mod_base = OTHER; note = 5-methyl
  modified_base 14: mod_base = OTHER; note = 5-methyl
  modified_base 19: mod_base = OTHER; note = 5-methyl
  source 1..20: mol_type = other DNA
  modified_base 11: mod_base = OTHER; note = Uracil
  modified_base 16: mod_base = OTHER; note = Uracil
  modified_base 17: mod_base = OTHER; note = Uracil
  modified_base 18: mod_base = OTHER; note = Uracil
tcaaggaagatggcatttct

SEQ ID NO: 13359 - DNA, 20 bp, synthetic construct
  misc_feature 1..20: note = Description of Artificial Sequence: Synthetic Antisense oligonucleotide
  misc_feature 1..20: note = Original Sequence: tcaaggaagauggcauuuct
  modified_base 1: mod_base = OTHER; note = bicyclic nucleic acid (BNA)
  modified_base 6: mod_base = OTHER; note = bicyclic nucleic acid (BNA)
  modified_base 12: mod_base = OTHER; note = bicyclic nucleic acid (BNA)
  modified_base 20: mod_base = OTHER; note = bicyclic nucleic acid (BNA)
  modified_base 2: mod_base = OTHER; note = 5-methyl
  modified_base 14: mod_base = OTHER; note = 5-methyl
  modified_base 19: mod_base = OTHER; note = 5-methyl
  source 1..20: mol_type = other DNA
  modified_base 11: mod_base = OTHER; note = Uracil
  modified_base 16: mod_base = OTHER; note = Uracil
  modified_base 17: mod_base = OTHER; note = Uracil
  modified_base 18: mod_base = OTHER; note = Uracil
tcaaggaagatggcatttct

SEQ ID NO: 13360 - DNA, 20 bp, synthetic construct
  misc_feature 1..20: note = Description of Artificial Sequence: Synthetic Antisense oligonucleotide
  misc_feature 1..20: note = Original Sequence: tcaaggaagauggcauuuct
  modified_base 1: mod_base = OTHER; note = bicyclic nucleic acid (BNA)
  modified_base 5..6: mod_base = OTHER; note = bicyclic nucleic acid (BNA)
  modified_base 20: mod_base = OTHER; note = bicyclic nucleic acid (BNA)
  modified_base 2: mod_base = OTHER; note = 5-methyl
  modified_base 14: mod_base = OTHER; note = 5-methyl
  modified_base 19: mod_base = OTHER; note = 5-methyl
  source 1..20: mol_type = other DNA
  modified_base 11: mod_base = OTHER; note = Uracil
  modified_base 16: mod_base = OTHER; note = Uracil
  modified_base 17: mod_base = OTHER; note = Uracil
  modified_base 18: mod_base = OTHER; note = Uracil
tcaaggaagatggcatttct

SEQ ID NO: 13361 - DNA, 20 bp, synthetic construct
  misc_feature 1..20: note = Description of Artificial Sequence: Synthetic Antisense oligonucleotide
  misc_feature 1..20: note = Original Sequence: tcaaggaagauggcauuuct
  modified_base 1..2: mod_base = OTHER; note = bicyclic nucleic acid (BNA)
  modified_base 14: mod_base = OTHER; note = bicyclic nucleic acid (BNA)
  modified_base 20: mod_base = OTHER; note = bicyclic nucleic acid (BNA)
  modified_base 2: mod_base = OTHER; note = 5-methyl
  modified_base 14: mod_base = OTHER; note = 5-methyl
  modified_base 19: mod_base = OTHER; note = 5-methyl
  source 1..20: mol_type = other DNA
  modified_base 11: mod_base = OTHER; note = Uracil
  modified_base 16: mod_base = OTHER; note = Uracil
  modified_base 17: mod_base = OTHER; note = Uracil
  modified_base 18: mod_base = OTHER; note = Uracil
tcaaggaagatggcatttct

SEQ ID NO: 13362 - DNA, 20 bp, synthetic construct
  misc_feature 1..20: note = Description of Artificial Sequence: Synthetic Antisense oligonucleotide
  misc_feature 1..20: note = Original Sequence: tcaaggaagauggcauuuct
  modified_base 1: mod_base = OTHER; note = bicyclic nucleic acid (BNA)
  modified_base 9: mod_base = OTHER; note = bicyclic nucleic acid (BNA)
  modified_base 12: mod_base = OTHER; note = bicyclic nucleic acid (BNA)
  modified_base 20: mod_base = OTHER; note = bicyclic nucleic acid (BNA)
  modified_base 2: mod_base = OTHER; note = 5-methyl
  modified_base 14: mod_base = OTHER; note = 5-methyl
  modified_base 19: mod_base = OTHER; note = 5-methyl
  source 1..20: mol_type = other DNA
  modified_base 11: mod_base = OTHER; note = Uracil
  modified_base 16: mod_base = OTHER; note = Uracil
  modified_base 17: mod_base = OTHER; note = Uracil
  modified_base 18: mod_base = OTHER; note = Uracil
tcaaggaagatggcatttct

SEQ ID NO: 13363 - DNA, 20 bp, synthetic construct
  misc_feature 1..20: note = Description of Artificial Sequence: Synthetic Antisense oligonucleotide
  misc_feature 1..20: note = Original Sequence: tcaaggaagauggcauuuct
  modified_base 1..2: mod_base = OTHER; note = bicyclic nucleic acid (BNA)
  modified_base 5: mod_base = OTHER; note = bicyclic nucleic acid (BNA)
  modified_base 20: mod_base = OTHER; note = bicyclic nucleic acid (BNA)
  modified_base 2: mod_base = OTHER; note = 5-methyl
  modified_base 14: mod_base = OTHER; note = 5-methyl
  modified_base 19: mod_base = OTHER; note = 5-methyl
  source 1..20: mol_type = other DNA
  modified_base 11: mod_base = OTHER; note = Uracil
  modified_base 16: mod_base = OTHER; note = Uracil
  modified_base 17: mod_base = OTHER; note = Uracil
  modified_base 18: mod_base = OTHER; note = Uracil
tcaaggaagatggcatttct

SEQ ID NO: 13364 - DNA, 20 bp, synthetic construct
  misc_feature 1..20: note = Description of Artificial Sequence: Synthetic Antisense oligonucleotide
  misc_feature 1..20: note = Original Sequence: tcaaggaagauggcauuuct
  modified_base 1: mod_base = OTHER; note = bicyclic nucleic acid (BNA)
  modified_base 13: mod_base = OTHER; note = bicyclic nucleic acid (BNA)
  modified_base 19..20: mod_base = OTHER; note = bicyclic nucleic acid (BNA)
  modified_base 2: mod_base = OTHER; note = 5-methyl
  modified_base 14: mod_base = OTHER; note = 5-methyl
  modified_base 19: mod_base = OTHER; note = 5-methyl
  source 1..20: mol_type = other DNA
  modified_base 11: mod_base = OTHER; note = Uracil
  modified_base 16: mod_base = OTHER; note = Uracil
  modified_base 17: mod_base = OTHER; note = Uracil
  modified_base 18: mod_base = OTHER; note = Uracil
tcaaggaagatggcatttct

SEQ ID NO: 13365 - DNA, 20 bp, synthetic construct
  misc_feature 1..20: note = Description of Artificial Sequence: Synthetic Antisense oligonucleotide
  misc_feature 1..20: note = Original Sequence: tcaaggaagauggcauuuct
  modified_base 1: mod_base = OTHER; note = bicyclic nucleic acid (BNA)
  modified_base 12..13: mod_base = OTHER; note = bicyclic nucleic acid (BNA)
  modified_base 20: mod_base = OTHER; note = bicyclic nucleic acid (BNA)
  modified_base 2: mod_base = OTHER; note = 5-methyl
  modified_base 14: mod_base = OTHER; note = 5-methyl
  modified_base 19: mod_base = OTHER; note = 5-methyl
  source 1..20: mol_type = other DNA
  modified_base 11: mod_base = OTHER; note = Uracil
  modified_base 16: mod_base = OTHER; note = Uracil
  modified_base 17: mod_base = OTHER; note = Uracil
  modified_base 18: mod_base = OTHER; note = Uracil
tcaaggaagatggcatttct

SEQ ID NO: 13366 - DNA, 20 bp, synthetic construct
  misc_feature 1..20: note = Description of Artificial Sequence: Synthetic Antisense oligonucleotide
  misc_feature 1..20: note = Original Sequence: tcaaggaagauggcauuuct
  modified_base 1: mod_base = OTHER; note = bicyclic nucleic acid (BNA)
  modified_base 5: mod_base = OTHER; note = bicyclic nucleic acid (BNA)
  modified_base 12: mod_base = OTHER; note = bicyclic nucleic acid (BNA)
  modified_base 20: mod_base = OTHER; note = bicyclic nucleic acid (BNA)
  modified_base 2: mod_base = OTHER; note = 5-methyl
  modified_base 14: mod_base = OTHER; note = 5-methyl
  modified_base 19: mod_base = OTHER; note = 5-methyl
  source 1..20: mol_type = other DNA
  modified_base 11: mod_base = OTHER; note = Uracil
  modified_base 16: mod_base = OTHER; note = Uracil
  modified_base 17: mod_base = OTHER; note = Uracil
  modified_base 18: mod_base = OTHER; note = Uracil
tcaaggaagatggcatttct

SEQ ID NO: 13367 - DNA, 20 bp, synthetic construct
  misc_feature 1..20: note = Description of Artificial Sequence: Synthetic Antisense oligonucleotide
  misc_feature 1..20: note = Original Sequence: tcaaggaagauggcauuuct
  modified_base 1..2: mod_base = OTHER; note = bicyclic nucleic acid (BNA)
  modified_base 13: mod_base = OTHER; note = bicyclic nucleic acid (BNA)
  modified_base 20: mod_base = OTHER; note = bicyclic nucleic acid (BNA)
  modified_base 2: mod_base = OTHER; note = 5-methyl
  modified_base 14: mod_base = OTHER; note = 5-methyl
  modified_base 19: mod_base = OTHER; note = 5-methyl
  source 1..20: mol_type = other DNA
  modified_base 11: mod_base = OTHER; note = Uracil
  modified_base 16: mod_base = OTHER; note = Uracil
  modified_base 17: mod_base = OTHER; note = Uracil
  modified_base 18: mod_base = OTHER; note = Uracil
tcaaggaagatggcatttct

SEQ ID NO: 13368 - DNA, 20 bp, synthetic construct
  misc_feature 1..20: note = Description of Artificial Sequence: Synthetic Antisense oligonucleotide
  misc_feature 1..20: note = Original Sequence: tcaaggaagauggcauuuct
  modified_base 1: mod_base = OTHER; note = bicyclic nucleic acid (BNA)
  modified_base 9: mod_base = OTHER; note = bicyclic nucleic acid (BNA)
  modified_base 13: mod_base = OTHER; note = bicyclic nucleic acid (BNA)
  modified_base 20: mod_base = OTHER; note = bicyclic nucleic acid (BNA)
  modified_base 2: mod_base = OTHER; note = 5-methyl
  modified_base 14: mod_base = OTHER; note = 5-methyl
  modified_base 19: mod_base = OTHER; note = 5-methyl
  source 1..20: mol_type = other DNA
  modified_base 11: mod_base = OTHER; note = Uracil
  modified_base 16: mod_base = OTHER; note = Uracil
  modified_base 17: mod_base = OTHER; note = Uracil
  modified_base 18: mod_base = OTHER; note = Uracil
tcaaggaagatggcatttct

SEQ ID NO: 13369 - DNA, 20 bp, synthetic construct
  misc_feature 1..20: note = Description of Artificial Sequence: Synthetic Antisense oligonucleotide
  misc_feature 1..20: note = Original Sequence: tcaaggaagauggcauuuct
  modified_base 1..2: mod_base = OTHER; note = bicyclic nucleic acid (BNA)
  modified_base 19..20: mod_base = OTHER; note = bicyclic nucleic acid (BNA)
  modified_base 2: mod_base = OTHER; note = 5-methyl
  modified_base 14: mod_base = OTHER; note = 5-methyl
  modified_base 19: mod_base = OTHER; note = 5-methyl
  source 1..20: mol_type = other DNA
  modified_base 11: mod_base = OTHER; note = Uracil
  modified_base 16: mod_base = OTHER; note = Uracil
  modified_base 17: mod_base = OTHER; note = Uracil
  modified_base 18: mod_base = OTHER; note = Uracil
tcaaggaagatggcatttct

SEQ ID NO: 13370 - DNA, 20 bp, synthetic construct
  misc_feature 1..20: note = Description of Artificial Sequence: Synthetic Antisense oligonucleotide
  misc_feature 1..20: note = Original Sequence: tcaaggaagauggcauuuct
  modified_base 1..2: mod_base = OTHER; note = bicyclic nucleic acid (BNA)
  modified_base 9: mod_base = OTHER; note = bicyclic nucleic acid (BNA)
  modified_base 20: mod_base = OTHER; note = bicyclic nucleic acid (BNA)
  modified_base 2: mod_base = OTHER; note = 5-methyl
  modified_base 14: mod_base = OTHER; note = 5-methyl
  modified_base 19: mod_base = OTHER; note = 5-methyl
  source 1..20: mol_type = other DNA
  modified_base 11: mod_base = OTHER; note = Uracil
  modified_base 16: mod_base = OTHER; note = Uracil
  modified_base 17: mod_base = OTHER; note = Uracil
  modified_base 18: mod_base = OTHER; note = Uracil
tcaaggaagatggcatttct

SEQ ID NO: 13371 - DNA, 20 bp, synthetic construct
  misc_feature 1..20: note = Description of Artificial Sequence: Synthetic Antisense oligonucleotide
  misc_feature 1..20: note = Original Sequence: tcaaggaagauggcauuuct
  modified_base 1: mod_base = OTHER; note = bicyclic nucleic acid (BNA)
  modified_base 14: mod_base = OTHER; note = bicyclic nucleic acid (BNA)
  modified_base 19..20: mod_base = OTHER; note = bicyclic nucleic acid (BNA)
  modified_base 2: mod_base = OTHER; note = 5-methyl
  modified_base 14: mod_base = OTHER; note = 5-methyl
  modified_base 19: mod_base = OTHER; note = 5-methyl
  source 1..20: mol_type = other DNA
  modified_base 11: mod_base = OTHER; note = Uracil
  modified_base 16: mod_base = OTHER; note = Uracil
  modified_base 17: mod_base = OTHER; note = Uracil
  modified_base 18: mod_base = OTHER; note = Uracil
tcaaggaagatggcatttct

SEQ ID NO: 13372 - DNA, 20 bp, synthetic construct
  misc_feature 1..20: note = Description of Artificial Sequence: Synthetic Antisense oligonucleotide
  misc_feature 1..20: note = Original Sequence: tcaaggaagauggcauuuct
  modified_base 1: mod_base = OTHER; note = bicyclic nucleic acid (BNA)
  modified_base 9: mod_base = OTHER; note = bicyclic nucleic acid (BNA)
  modified_base 19..20: mod_base = OTHER; note = bicyclic nucleic acid (BNA)
  modified_base 2: mod_base = OTHER; note = 5-methyl
  modified_base 14: mod_base = OTHER; note = 5-methyl
  modified_base 19: mod_base = OTHER; note = 5-methyl
  source 1..20: mol_type = other DNA
  modified_base 11: mod_base = OTHER; note = Uracil
  modified_base 16: mod_base = OTHER; note = Uracil
  modified_base 17: mod_base = OTHER; note = Uracil
  modified_base 18: mod_base = OTHER; note = Uracil
tcaaggaagatggcatttct

SEQ ID NO: 13373 - DNA, 22 bp, synthetic construct
  misc_feature 1..22: note = Description of Artificial Sequence: Synthetic Antisense oligonucleotide
  misc_feature 1..22: note = Original Sequence: tcaaggaagauggcauuucuag
  modified_base 1: mod_base = OTHER; note = bicyclic nucleic acid (BNA)
  modified_base 9: mod_base = OTHER; note = bicyclic nucleic acid (BNA)
  modified_base 14: mod_base = OTHER; note = bicyclic nucleic acid (BNA)
  modified_base 22: mod_base = OTHER; note = bicyclic nucleic acid (BNA)
  modified_base 2: mod_base = OTHER; note = 5-methyl
  modified_base 14: mod_base = OTHER; note = 5-methyl
  modified_base 19: mod_base = OTHER; note = 5-methyl
  source 1..22: mol_type = other DNA
  modified_base 11: mod_base = OTHER; note = Uracil
  modified_base 16: mod_base = OTHER; note = Uracil
  modified_base 17: mod_base = OTHER; note = Uracil
  modified_base 18: mod_base = OTHER; note = Uracil
  modified_base 20: mod_base = OTHER; note = Uracil
tcaaggaagatggcatttctag

SEQ ID NO: 13374 - DNA, 22 bp, synthetic construct
  misc_feature 1..22: note = Description of Artificial Sequence: Synthetic Antisense oligonucleotide
  misc_feature 1..22: note = Original Sequence: tcaaggaagauggcauuucuag
  modified_base 1: mod_base = OTHER; note = bicyclic nucleic acid (BNA)
  modified_base 5: mod_base = OTHER; note = bicyclic nucleic acid (BNA)
  modified_base 9: mod_base = OTHER; note = bicyclic nucleic acid (BNA)
  modified_base 22: mod_base = OTHER; note = bicyclic nucleic acid (BNA)
  modified_base 2: mod_base = OTHER; note = 5-methyl
  modified_base 14: mod_base = OTHER; note = 5-methyl
  modified_base 19: mod_base = OTHER; note = 5-methyl
  source 1..22: mol_type = other DNA
  modified_base 11: mod_base = OTHER; note = Uracil
  modified_base 16: mod_base = OTHER; note = Uracil
  modified_base 17: mod_base = OTHER; note = Uracil
  modified_base 18: mod_base = OTHER; note = Uracil
  modified_base 20: mod_base = OTHER; note = Uracil
tcaaggaagatggcatttctag

SEQ ID NO: 13375 - DNA, 22 bp, synthetic construct
  misc_feature 1..22: note = Description of Artificial Sequence: Synthetic Antisense oligonucleotide
  misc_feature 1..22: note = Original Sequence: tcaaggaagauggcauuucuag
  modified_base 1: mod_base = OTHER; note = bicyclic nucleic acid (BNA)
  modified_base 5: mod_base = OTHER; note = bicyclic nucleic acid (BNA)
  modified_base 19: mod_base = OTHER; note = bicyclic nucleic acid (BNA)
  modified_base 22: mod_base = OTHER; note = bicyclic nucleic acid (BNA)
  modified_base 2: mod_base = OTHER; note = 5-methyl
  modified_base 14: mod_base = OTHER; note = 5-methyl
  modified_base 19: mod_base = OTHER; note = 5-methyl
  source 1..22: mol_type = other DNA
  modified_base 11: mod_base = OTHER; note = Uracil
  modified_base 16: mod_base = OTHER; note = Uracil
  modified_base 17: mod_base = OTHER; note = Uracil
  modified_base 18: mod_base = OTHER; note = Uracil
  modified_base 20: mod_base = OTHER; note = Uracil
tcaaggaagatggcatttctag

SEQ ID NO: 13376 - DNA, 22 bp, synthetic construct
  misc_feature 1..22: note = Description of Artificial Sequence: Synthetic Antisense oligonucleotide
  misc_feature 1..22: note = Original Sequence: tcaaggaagauggcauuucuag
  modified_base 1: mod_base = OTHER; note = bicyclic nucleic acid (BNA)
  modified_base 6: mod_base = OTHER; note = bicyclic nucleic acid (BNA)
  modified_base 14: mod_base = OTHER; note = bicyclic nucleic acid (BNA)
  modified_base 22: mod_base = OTHER; note = bicyclic nucleic acid (BNA)
  modified_base 2: mod_base = OTHER; note = 5-methyl
  modified_base 14: mod_base = OTHER; note = 5-methyl
  modified_base 19: mod_base = OTHER; note = 5-methyl
  source 1..22: mol_type = other DNA
  modified_base 11: mod_base = OTHER; note = Uracil
  modified_base 16: mod_base = OTHER; note = Uracil
  modified_base 17: mod_base = OTHER; note = Uracil
  modified_base 18: mod_base = OTHER; note = Uracil
  modified_base 20: mod_base = OTHER; note = Uracil
tcaaggaagatggcatttctag

SEQ ID NO: 13377 - DNA, 22 bp, synthetic construct
  misc_feature 1..22: note = Description of Artificial Sequence: Synthetic Antisense oligonucleotide
  misc_feature 1..22: note = Original Sequence: tcaaggaagauggcauuucuag
  modified_base 1: mod_base = OTHER; note = bicyclic nucleic acid (BNA)
  modified_base 5: mod_base = OTHER; note = bicyclic nucleic acid (BNA)
  modified_base 13: mod_base = OTHER; note = bicyclic nucleic acid (BNA)
  modified_base 22: mod_base = OTHER; note = bicyclic nucleic acid (BNA)
  modified_base 2: mod_base = OTHER; note = 5-methyl
  modified_base 14: mod_base = OTHER; note = 5-methyl
  modified_base 19: mod_base = OTHER; note = 5-methyl
  source 1..22: mol_type = other DNA
  modified_base 11: mod_base = OTHER; note = Uracil
  modified_base 16: mod_base = OTHER; note = Uracil
  modified_base 17: mod_base = OTHER; note = Uracil
  modified_base 18: mod_base = OTHER; note = Uracil
  modified_base 20: mod_base = OTHER; note = Uracil
tcaaggaagatggcatttctag

SEQ ID NO: 13378 - DNA, 22 bp, synthetic construct
  misc_feature 1..22: note = Description of Artificial Sequence: Synthetic Antisense oligonucleotide
  misc_feature 1..22: note = Original Sequence: tcaaggaagauggcauuucuag
  modified_base 1..2: mod_base = OTHER; note = bicyclic nucleic acid (BNA)
  modified_base 12: mod_base = OTHER; note = bicyclic nucleic acid (BNA)
  modified_base 22: mod_base = OTHER; note = bicyclic nucleic acid (BNA)
  modified_base 2: mod_base = OTHER; note = 5-methyl
  modified_base 14: mod_base = OTHER; note = 5-methyl
  modified_base 19: mod_base = OTHER; note = 5-methyl
  source 1..22: mol_type = other DNA
  modified_base 11: mod_base = OTHER; note = Uracil
  modified_base 16: mod_base = OTHER; note = Uracil
  modified_base 17: mod_base = OTHER; note = Uracil
  modified_base 18: mod_base = OTHER; note = Uracil
  modified_base 20: mod_base = OTHER; note = Uracil
tcaaggaagatggcatttctag

SEQ ID NO: 13379 - DNA, 22 bp, synthetic construct
  misc_feature 1..22: note = Description of Artificial Sequence: Synthetic Antisense oligonucleotide
  misc_feature 1..22: note = Original Sequence: tcaaggaagauggcauuucuag
  modified_base 1: mod_base = OTHER; note = bicyclic nucleic acid (BNA)
  modified_base 6: mod_base = OTHER; note = bicyclic nucleic acid (BNA)
  modified_base 9: mod_base = OTHER; note = bicyclic nucleic acid (BNA)
  modified_base 22: mod_base = OTHER; note = bicyclic nucleic acid (BNA)
  modified_base 2: mod_base = OTHER; note = 5-methyl
  modified_base 14: mod_base = OTHER; note = 5-methyl
  modified_base 19: mod_base = OTHER; note = 5-methyl
  source 1..22: mol_type = other DNA
  modified_base 11: mod_base = OTHER; note = Uracil
  modified_base 16: mod_base = OTHER; note = Uracil
  modified_base 17: mod_base = OTHER; note = Uracil
  modified_base 18: mod_base = OTHER; note = Uracil
  modified_base 20: mod_base = OTHER; note = Uracil
tcaaggaagatggcatttctag

SEQ ID NO: 13380 - DNA, 22 bp, synthetic construct
  misc_feature 1..22: note = Description of Artificial Sequence: Synthetic Antisense oligonucleotide
  misc_feature 1..22: note = Original Sequence: tcaaggaagauggcauuucuag
  modified_base 1: mod_base = OTHER; note = bicyclic nucleic acid (BNA)
  modified_base 13..14: mod_base = OTHER; note = bicyclic nucleic acid (BNA)
  modified_base 22: mod_base = OTHER; note = bicyclic nucleic acid (BNA)
  modified_base 2: mod_base = OTHER; note = 5-methyl
  modified_base 14: mod_base = OTHER; note = 5-methyl
  modified_base 19: mod_base = OTHER; note = 5-methyl
  source 1..22: mol_type = other DNA
  modified_base 11: mod_base = OTHER; note = Uracil
  modified_base 16: mod_base = OTHER; note = Uracil
  modified_base 17: mod_base = OTHER; note = Uracil
  modified_base 18: mod_base = OTHER; note = Uracil
  modified_base 20: mod_base = OTHER; note = Uracil
tcaaggaagatggcatttctag

SEQ ID NO: 13381 - DNA, 22 bp, synthetic construct
  misc_feature 1..22: note = Description of Artificial Sequence: Synthetic Antisense oligonucleotide
  misc_feature 1..22: note = Original Sequence: tcaaggaagauggcauuucuag
  modified_base 1: mod_base = OTHER; note = bicyclic nucleic acid (BNA)
  modified_base 6: mod_base = OTHER; note = bicyclic nucleic acid (BNA)
  modified_base 13: mod_base = OTHER; note = bicyclic nucleic acid (BNA)
  modified_base 22: mod_base = OTHER; note = bicyclic nucleic acid (BNA)
  modified_base 2: mod_base = OTHER; note = 5-methyl
  modified_base 14: mod_base = OTHER; note = 5-methyl
  modified_base 19: mod_base = OTHER; note = 5-methyl
  source 1..22: mol_type = other DNA
  modified_base 11: mod_base = OTHER; note = Uracil
  modified_base 16: mod_base = OTHER; note = Uracil
  modified_base 17: mod_base = OTHER; note = Uracil
  modified_base 18: mod_base = OTHER; note = Uracil
  modified_base 20: mod_base = OTHER; note = Uracil
tcaaggaagatggcatttctag

SEQ ID NO: 13382 - DNA, 22 bp, synthetic construct
  misc_feature 1..22: note = Description of Artificial Sequence: Synthetic Antisense oligonucleotide
  misc_feature 1..22: note = Original Sequence: tcaaggaagauggcauuucuag
  modified_base 1: mod_base = OTHER; note = bicyclic nucleic acid (BNA)
  modified_base 6: mod_base = OTHER; note = bicyclic nucleic acid (BNA)
  modified_base 19: mod_base = OTHER; note = bicyclic nucleic acid (BNA)
  modified_base 22: mod_base = OTHER; note = bicyclic nucleic acid (BNA)
  modified_base 2: mod_base = OTHER; note = 5-methyl
  modified_base 14: mod_base = OTHER; note = 5-methyl
  modified_base 19: mod_base = OTHER; note = 5-methyl
  source 1..22: mol_type = other DNA
  modified_base 11: mod_base = OTHER; note = Uracil
  modified_base 16: mod_base = OTHER; note = Uracil
  modified_base 17: mod_base = OTHER; note = Uracil
  modified_base 18: mod_base = OTHER; note = Uracil
  modified_base 20: mod_base = OTHER; note = Uracil
tcaaggaagatggcatttctag

SEQ ID NO: 13383 - DNA, 22 bp, synthetic construct
  misc_feature 1..22: note = Description of Artificial Sequence: Synthetic Antisense oligonucleotide
  misc_feature 1..22: note = Original Sequence: tcaaggaagauggcauuucuag
  modified_base 1: mod_base = OTHER; note = bicyclic nucleic acid (BNA)
  modified_base 5: mod_base = OTHER; note = bicyclic nucleic acid (BNA)
  modified_base 14: mod_base = OTHER; note = bicyclic nucleic acid (BNA)
  modified_base 22: mod_base = OTHER; note = bicyclic nucleic acid (BNA)
  modified_base 2: mod_base = OTHER; note = 5-methyl
  modified_base 14: mod_base = OTHER; note = 5-methyl
  modified_base 19: mod_base = OTHER; note = 5-methyl
  source 1..22: mol_type = other DNA
  modified_base 11: mod_base = OTHER; note = Uracil
  modified_base 16: mod_base = OTHER; note = Uracil
  modified_base 17: mod_base = OTHER; note = Uracil
  modified_base 18: mod_base = OTHER; note = Uracil
  modified_base 20: mod_base = OTHER; note = Uracil
tcaaggaagatggcatttctag

SEQ ID NO: 13384 - DNA, 22 bp, synthetic construct
  misc_feature 1..22: note = Description of Artificial Sequence: Synthetic Antisense oligonucleotide
  misc_feature 1..22: note = Original Sequence: tcaaggaagauggcauuucuag
  modified_base 1..2: mod_base = OTHER; note = bicyclic nucleic acid (BNA)
  modified_base 6: mod_base = OTHER; note = bicyclic nucleic acid (BNA)
  modified_base 22: mod_base = OTHER; note = bicyclic nucleic acid (BNA)
  modified_base 2: mod_base = OTHER; note = 5-methyl
  modified_base 14: mod_base = OTHER; note = 5-methyl
  modified_base 19: mod_base = OTHER; note = 5-methyl
  source 1..22: mol_type = other DNA
  modified_base 11: mod_base = OTHER; note = Uracil
  modified_base 16: mod_base = OTHER; note = Uracil
  modified_base 17: mod_base = OTHER; note = Uracil
  modified_base 18: mod_base = OTHER; note = Uracil
  modified_base 20: mod_base = OTHER; note = Uracil
tcaaggaagatggcatttctag

SEQ ID NO: 13385 - DNA, 22 bp, synthetic construct
  misc_feature 1..22: note = Description of Artificial Sequence: Synthetic Antisense oligonucleotide
  misc_feature 1..22: note = Original Sequence: tcaaggaagauggcauuucuag
  modified_base 1: mod_base = OTHER; note = bicyclic nucleic acid (BNA)
  modified_base 12: mod_base = OTHER; note = bicyclic nucleic acid (BNA)
  modified_base 19: mod_base = OTHER; note = bicyclic nucleic acid (BNA)
  modified_base 22: mod_base = OTHER; note = bicyclic nucleic acid (BNA)
  modified_base 2: mod_base = OTHER; note = 5-methyl
  modified_base 14: mod_base = OTHER; note = 5-methyl
  modified_base 19: mod_base = OTHER; note = 5-methyl
  source 1..22: mol_type = other DNA
  modified_base 11: mod_base = OTHER; note = Uracil
  modified_base 16: mod_base = OTHER; note = Uracil
  modified_base 17: mod_base = OTHER; note = Uracil
  modified_base 18: mod_base = OTHER; note = Uracil
  modified_base 20: mod_base = OTHER; note = Uracil
tcaaggaagatggcatttctag

SEQ ID NO: 13386 - DNA, 22 bp, synthetic construct
  misc_feature 1..22: note = Description of Artificial Sequence: Synthetic Antisense oligonucleotide
  misc_feature 1..22: note = Original Sequence: tcaaggaagauggcauuucuag
  modified_base 1: mod_base = OTHER; note = bicyclic nucleic acid (BNA)
  modified_base 12: mod_base = OTHER; note = bicyclic nucleic acid (BNA)
  modified_base 14: mod_base = OTHER; note = bicyclic nucleic acid (BNA)
  modified_base 22: mod_base = OTHER; note = bicyclic nucleic acid (BNA)
  modified_base 2: mod_base = OTHER; note = 5-methyl
  modified_base 14: mod_base = OTHER; note = 5-methyl
  modified_base 19: mod_base = OTHER; note = 5-methyl
  source 1..22: mol_type = other DNA
  modified_base 11: mod_base = OTHER; note = Uracil
  modified_base 16: mod_base = OTHER; note = Uracil
  modified_base 17: mod_base = OTHER; note = Uracil
  modified_base 18: mod_base = OTHER; note = Uracil
  modified_base 20: mod_base = OTHER; note = Uracil
tcaaggaagatggcatttctag

SEQ ID NO: 13387 - DNA, 22 bp, synthetic construct
  misc_feature 1..22: note = Description of Artificial Sequence: Synthetic Antisense oligonucleotide
  misc_feature 1..22: note = Original Sequence: tcaaggaagauggcauuucuag
  modified_base 1: mod_base = OTHER; note = bicyclic nucleic acid (BNA)
  modified_base 6: mod_base = OTHER; note = bicyclic nucleic acid (BNA)
  modified_base 12: mod_base = OTHER; note = bicyclic nucleic acid (BNA)
  modified_base 22: mod_base = OTHER; note = bicyclic nucleic acid (BNA)
  modified_base 2: mod_base = OTHER; note = 5-methyl
  modified_base 14: mod_base = OTHER; note = 5-methyl
  modified_base 19: mod_base = OTHER; note = 5-methyl
  source 1..22: mol_type = other DNA
  modified_base 11: mod_base = OTHER; note = Uracil
  modified_base 16: mod_base = OTHER; note = Uracil
  modified_base 17: mod_base = OTHER; note = Uracil
  modified_base 18: mod_base = OTHER; note = Uracil
  modified_base 20: mod_base = OTHER; note = Uracil
tcaaggaagatggcatttctag

SEQ ID NO: 13388 - DNA, 22 bp, synthetic construct
  misc_feature 1..22: note = Description of Artificial Sequence: Synthetic Antisense oligonucleotide
  misc_feature 1..22: note = Original Sequence: tcaaggaagauggcauuucuag
  modified_base 1: mod_base = OTHER; note = bicyclic nucleic acid (BNA)
  modified_base 5..6: mod_base = OTHER; note = bicyclic nucleic acid (BNA)
  modified_base 22: mod_base = OTHER; note = bicyclic nucleic acid (BNA)
  modified_base 2: mod_base = OTHER; note = 5-methyl
  modified_base 14: mod_base = OTHER; note = 5-methyl
  modified_base 19: mod_base = OTHER; note = 5-methyl
  source 1..22: mol_type = other DNA
  modified_base 11: mod_base = OTHER; note = Uracil
  modified_base 16: mod_base = OTHER; note = Uracil
  modified_base 17: mod_base = OTHER; note = Uracil
  modified_base 18: mod_base = OTHER; note = Uracil
  modified_base 20: mod_base = OTHER; note = Uracil
tcaaggaagatggcatttctag

SEQ ID NO: 13389 - DNA, 22 bp, synthetic construct
  misc_feature 1..22: note = Description of Artificial Sequence: Synthetic Antisense oligonucleotide
  misc_feature 1..22: note = Original Sequence: tcaaggaagauggcauuucuag
  modified_base 1..2: mod_base = OTHER; note = bicyclic nucleic acid (BNA)
  modified_base 14: mod_base = OTHER; note = bicyclic nucleic acid (BNA)
  modified_base 22: mod_base = OTHER; note = bicyclic nucleic acid (BNA)
  modified_base 2: mod_base = OTHER; note = 5-methyl
  modified_base 14: mod_base = OTHER; note = 5-methyl
  modified_base 19: mod_base = OTHER; note = 5-methyl
  source 1..22: mol_type = other DNA
  modified_base 11: mod_base = OTHER; note = Uracil
  modified_base 16: mod_base = OTHER; note = Uracil
  modified_base 17: mod_base = OTHER; note = Uracil
  modified_base 18: mod_base = OTHER; note = Uracil
  modified_base 20: mod_base = OTHER; note = Uracil
tcaaggaagatggcatttctag

SEQ ID NO: 13390 - DNA, 22 bp, synthetic construct
  misc_feature 1..22: note = Description of Artificial Sequence: Synthetic Antisense oligonucleotide
  misc_feature 1..22: note = Original Sequence: tcaaggaagauggcauuucuag
  modified_base 1: mod_base = OTHER; note = bicyclic nucleic acid (BNA)
  modified_base 9: mod_base = OTHER; note = bicyclic nucleic acid (BNA)
  modified_base 12: mod_base = OTHER; note = bicyclic nucleic acid (BNA)
  modified_base 22: mod_base = OTHER; note = bicyclic nucleic acid (BNA)
  modified_base 2: mod_base = OTHER; note = 5-methyl
  modified_base 14: mod_base = OTHER; note = 5-methyl
  modified_base 19: mod_base = OTHER; note = 5-methyl
  source 1..22: mol_type = other DNA
  modified_base 11: mod_base = OTHER; note = Uracil
  modified_base 16: mod_base = OTHER; note = Uracil
  modified_base 17: mod_base = OTHER; note = Uracil
  modified_base 18: mod_base = OTHER; note = Uracil
  modified_base 20: mod_base = OTHER; note = Uracil
tcaaggaagatggcatttctag

SEQ ID NO: 13391 - DNA, 22 bp, synthetic construct
  misc_feature 1..22: note = Description of Artificial Sequence: Synthetic Antisense oligonucleotide
  misc_feature 1..22: note = Original Sequence: tcaaggaagauggcauuucuag
  modified_base 1..2: mod_base = OTHER; note = bicyclic nucleic acid (BNA)
  modified_base 5: mod_base = OTHER; note = bicyclic nucleic acid (BNA)
  modified_base 22: mod_base = OTHER; note = bicyclic nucleic acid (BNA)
  modified_base 2: mod_base = OTHER; note = 5-methyl
  modified_base 14: mod_base = OTHER; note = 5-methyl
  modified_base 19: mod_base = OTHER; note = 5-methyl
  source 1..22: mol_type = other DNA
  modified_base 11: mod_base = OTHER; note = Uracil
  modified_base 16: mod_base = OTHER; note = Uracil
  modified_base 17: mod_base = OTHER; note = Uracil
  modified_base 18: mod_base = OTHER; note = Uracil
  modified_base 20: mod_base = OTHER; note = Uracil
tcaaggaagatggcatttctag

SEQ ID NO: 13392 - DNA, 22 bp, synthetic construct
  misc_feature 1..22: note = Description of Artificial Sequence: Synthetic Antisense oligonucleotide
  misc_feature 1..22: note = Original Sequence: tcaaggaagauggcauuucuag
  modified_base 1: mod_base = OTHER; note = bicyclic nucleic acid (BNA)
  modified_base 13: mod_base = OTHER; note = bicyclic nucleic acid (BNA)
  modified_base 19: mod_base = OTHER; note = bicyclic nucleic acid (BNA)
  modified_base 22: mod_base = OTHER; note = bicyclic nucleic acid (BNA)
  modified_base 2: mod_base = OTHER; note = 5-methyl
  modified_base 14: mod_base = OTHER; note = 5-methyl
  modified_base 19: mod_base = OTHER; note = 5-methyl
  source 1..22: mol_type = other DNA
  modified_base 11: mod_base = OTHER; note = Uracil
  modified_base 16: mod_base = OTHER; note = Uracil
  modified_base 17: mod_base = OTHER; note = Uracil
  modified_base 18: mod_base = OTHER; note = Uracil
  modified_base 20: mod_base = OTHER; note = Uracil
tcaaggaagatggcatttctag

SEQ ID NO: 13393 - DNA, 22 bp, synthetic construct
  misc_feature 1..22: note = Description of Artificial Sequence: Synthetic Antisense oligonucleotide
  misc_feature 1..22: note = Original Sequence: tcaaggaagauggcauuucuag
  modified_base 1: mod_base = OTHER; note = bicyclic nucleic acid (BNA)
  modified_base 12..13: mod_base = OTHER; note = bicyclic nucleic acid (BNA)
  modified_base 22: mod_base = OTHER; note = bicyclic nucleic acid (BNA)
  modified_base 2: mod_base = OTHER; note = 5-methyl
  modified_base 14: mod_base = OTHER; note = 5-methyl
  modified_base 19: mod_base = OTHER; note = 5-methyl
  source 1..22: mol_type = other DNA
  modified_base 11: mod_base = OTHER; note = Uracil
  modified_base 16: mod_base = OTHER; note = Uracil
  modified_base 17: mod_base = OTHER; note = Uracil
  modified_base 18: mod_base = OTHER; note = Uracil
  modified_base 20: mod_base = OTHER; note = Uracil
tcaaggaagatggcatttctag

SEQ ID NO: 13394 - DNA, 22 bp, synthetic construct
  misc_feature 1..22: note = Description of Artificial Sequence: Synthetic Antisense oligonucleotide
  misc_feature 1..22: note = Original Sequence: tcaaggaagauggcauuucuag
  modified_base 1: mod_base = OTHER; note = bicyclic nucleic acid (BNA)
  modified_base 5: mod_base = OTHER; note = bicyclic nucleic acid (BNA)
  modified_base 12: mod_base = OTHER; note = bicyclic nucleic acid (BNA)
  modified_base 22: mod_base = OTHER; note = bicyclic nucleic acid (BNA)
  modified_base 2: mod_base = OTHER; note = 5-methyl
  modified_base 14: mod_base = OTHER; note = 5-methyl
  modified_base 19: mod_base = OTHER; note = 5-methyl
  source 1..22: mol_type = other DNA
  modified_base 11: mod_base = OTHER; note = Uracil
  modified_base 16: mod_base = OTHER; note = Uracil
  modified_base 17: mod_base = OTHER; note = Uracil
  modified_base 18: mod_base = OTHER; note = Uracil
  modified_base 20: mod_base = OTHER; note = Uracil
tcaaggaagatggcatttctag

SEQ ID NO: 13395 - DNA, 22 bp, synthetic construct
  misc_feature 1..22: note = Description of Artificial Sequence: Synthetic Antisense oligonucleotide
  misc_feature 1..22: note = Original Sequence: tcaaggaagauggcauuucuag
  modified_base 1..2: mod_base = OTHER; note = bicyclic nucleic acid (BNA)
  modified_base 13: mod_base = OTHER; note = bicyclic nucleic acid (BNA)
  modified_base 22: mod_base = OTHER; note = bicyclic nucleic acid (BNA)
  modified_base 2: mod_base = OTHER; note = 5-methyl
  modified_base 14: mod_base = OTHER; note = 5-methyl
  modified_base 19: mod_base = OTHER; note = 5-methyl
  source 1..22: mol_type = other DNA
  modified_base 11: mod_base = OTHER; note = Uracil
  modified_base 16: mod_base = OTHER; note = Uracil
  modified_base 17: mod_base = OTHER; note = Uracil
  modified_base 18: mod_base = OTHER; note = Uracil
  modified_base 20: mod_base = OTHER; note = Uracil
tcaaggaagatggcatttctag

SEQ ID NO: 13396 - DNA, 22 bp, synthetic construct
  misc_feature 1..22: note = Description of Artificial Sequence: Synthetic Antisense oligonucleotide
  misc_feature 1..22: note = Original Sequence: tcaaggaagauggcauuucuag
  modified_base 1: mod_base = OTHER; note = bicyclic nucleic acid (BNA)
  modified_base 9: mod_base = OTHER; note = bicyclic nucleic acid (BNA)
  modified_base 13: mod_base = OTHER; note = bicyclic nucleic acid (BNA)
  modified_base 22: mod_base = OTHER; note = bicyclic nucleic acid (BNA)
  modified_base 2: mod_base = OTHER; note = 5-methyl
  modified_base 14: mod_base = OTHER; note = 5-methyl
  modified_base 19: mod_base = OTHER; note = 5-methyl
  source 1..22: mol_type = other DNA
  modified_base 11: mod_base = OTHER; note = Uracil
  modified_base 16: mod_base = OTHER; note = Uracil
  modified_base 17: mod_base = OTHER; note = Uracil
  modified_base 18: mod_base = OTHER; note = Uracil
  modified_base 20: mod_base = OTHER; note = Uracil
tcaaggaagatggcatttctag

SEQ ID NO: 13397 - DNA, 22 bp, synthetic construct
  misc_feature 1..22: note = Description of Artificial Sequence: Synthetic Antisense oligonucleotide
  misc_feature 1..22: note = Original Sequence: tcaaggaagauggcauuucuag
  modified_base 1..2: mod_base = OTHER; note = bicyclic nucleic acid (BNA)
  modified_base 19: mod_base = OTHER; note = bicyclic nucleic acid (BNA)
  modified_base 22: mod_base = OTHER; note = bicyclic nucleic acid (BNA)
  modified_base 2: mod_base = OTHER; note = 5-methyl
  modified_base 14: mod_base = OTHER; note = 5-methyl
  modified_base 19: mod_base = OTHER; note = 5-methyl
  source 1..22: mol_type = other DNA
  modified_base 11: mod_base = OTHER; note = Uracil
  modified_base 16: mod_base = OTHER; note = Uracil
  modified_base 17: mod_base = OTHER; note = Uracil
  modified_base 18: mod_base = OTHER; note = Uracil
  modified_base 20: mod_base = OTHER; note = Uracil
tcaaggaagatggcatttctag

SEQ ID NO: 13398 - DNA, 22 bp, synthetic construct
  misc_feature 1..22: note = Description of Artificial Sequence: Synthetic Antisense oligonucleotide
  misc_feature 1..22: note = Original Sequence: tcaaggaagauggcauuucuag
  modified_base 1..2: mod_base = OTHER; note = bicyclic nucleic acid (BNA)
  modified_base 9: mod_base = OTHER; note = bicyclic nucleic acid (BNA)
  modified_base 22: mod_base = OTHER; note = bicyclic nucleic acid (BNA)
  modified_base 2: mod_base = OTHER; note = 5-methyl
  modified_base 14: mod_base = OTHER; note = 5-methyl
  modified_base 19: mod_base = OTHER; note = 5-methyl
  source 1..22: mol_type = other DNA
  modified_base 11: mod_base = OTHER; note = Uracil
  modified_base 16: mod_base = OTHER; note = Uracil
  modified_base 17: mod_base = OTHER; note = Uracil
  modified_base 18: mod_base = OTHER; note = Uracil
  modified_base 20: mod_base = OTHER; note = Uracil
tcaaggaagatggcatttctag

SEQ ID NO: 13399 - DNA, 22 bp, synthetic construct
  misc_feature 1..22: note = Description of Artificial Sequence: Synthetic Antisense oligonucleotide
  misc_feature 1..22: note = Original Sequence: tcaaggaagauggcauuucuag
  modified_base 1: mod_base = OTHER; note = bicyclic nucleic acid (BNA)
  modified_base 14: mod_base = OTHER; note = bicyclic nucleic acid (BNA)
  modified_base 19: mod_base = OTHER; note = bicyclic nucleic acid (BNA)
  modified_base 22: mod_base = OTHER; note = bicyclic nucleic acid (BNA)
  modified_base 2: mod_base = OTHER; note = 5-methyl
  modified_base 14: mod_base = OTHER; note = 5-methyl
  modified_base 19: mod_base = OTHER; note = 5-methyl
  source 1..22: mol_type = other DNA
  modified_base 11: mod_base = OTHER; note = Uracil
  modified_base 16: mod_base = OTHER; note = Uracil
  modified_base 17: mod_base = OTHER; note = Uracil
  modified_base 18: mod_base = OTHER; note = Uracil
  modified_base 20: mod_base = OTHER; note = Uracil
tcaaggaagatggcatttctag

SEQ ID NO: 13400 - DNA, 22 bp, synthetic construct
  misc_feature 1..22: note = Description of Artificial Sequence: Synthetic Antisense oligonucleotide
  misc_feature 1..22: note = Original Sequence: tcaaggaagauggcauuucuag
  modified_base 1: mod_base = OTHER; note = bicyclic nucleic acid (BNA)
  modified_base 9: mod_base = OTHER; note = bicyclic nucleic acid (BNA)
  modified_base 19: mod_base = OTHER; note = bicyclic nucleic acid (BNA)
  modified_base 22: mod_base = OTHER; note = bicyclic nucleic acid (BNA)
  modified_base 2: mod_base = OTHER; note = 5-methyl
  modified_base 14: mod_base = OTHER; note = 5-methyl
  modified_base 19: mod_base = OTHER; note = 5-methyl
  source 1..22: mol_type = other DNA
  modified_base 11: mod_base = OTHER; note = Uracil
  modified_base 16: mod_base = OTHER; note = Uracil
  modified_base 17: mod_base = OTHER; note = Uracil
  modified_base 18: mod_base = OTHER; note = Uracil
  modified_base 20: mod_base = OTHER; note = Uracil
tcaaggaagatggcatttctag

SEQ ID NO: 13401 - DNA, 18 bp, synthetic construct
  misc_feature 1..18: note = Description of Artificial Sequence: Synthetic Antisense oligonucleotide
  modified_base 1..2: mod_base = OTHER; note = bicyclic nucleic acid (BNA)
  modified_base 18: mod_base = OTHER; note = bicyclic nucleic acid (BNA)
  source 1..18: mol_type = other DNA
ggtaagttctgtccaagc

SEQ ID NO: 13402 - DNA, 18 bp, synthetic construct
  misc_feature 1..18: note = Description of Artificial Sequence: Synthetic Antisense oligonucleotide
  modified_base 1: mod_base = OTHER; note = bicyclic nucleic acid (BNA)
  modified_base 9: mod_base = OTHER; note = bicyclic nucleic acid (BNA)
  modified_base 18: mod_base = OTHER; note = bicyclic nucleic acid (BNA)
  source 1..18: mol_type = other DNA
ggtaagttctgtccaagc

SEQ ID NO: 13403 - DNA, 18 bp, synthetic construct
  misc_feature 1..18: note = Description of Artificial Sequence: Synthetic Antisense oligonucleotide
  modified_base 1: mod_base = OTHER; note = bicyclic nucleic acid (BNA)
  modified_base 11: mod_base = OTHER; note = bicyclic nucleic acid (BNA)
  modified_base 18: mod_base = OTHER; note = bicyclic nucleic acid (BNA)
  source 1..18: mol_type = other DNA
ggtaagttctgtccaagc

SEQ ID NO: 13404 - DNA, 18 bp, synthetic construct
  misc_feature 1..18: note = Description of Artificial Sequence: Synthetic Antisense oligonucleotide
  modified_base 1: mod_base = OTHER; note = bicyclic nucleic acid (BNA)
  modified_base 6: mod_base = OTHER; note = bicyclic nucleic acid (BNA)
  modified_base 18: mod_base = OTHER; note = bicyclic nucleic acid (BNA)
  source 1..18: mol_type = other DNA
ggtaagttctgtccaagc

SEQ ID NO: 13405 - DNA, 18 bp, synthetic construct
  misc_feature 1..18: note = Description of Artificial Sequence: Synthetic Antisense oligonucleotide
  modified_base 1: mod_base = OTHER; note = bicyclic nucleic acid (BNA)
  modified_base 17..18: mod_base = OTHER; note = bicyclic nucleic acid (BNA)
  source 1..18: mol_type = other DNA
ggtaagttctgtccaagc

SEQ ID NO: 13406 - DNA, 18 bp, synthetic construct
  misc_feature 1..18: note = Description of Artificial Sequence: Synthetic Antisense oligonucleotide
  modified_base 1: mod_base = OTHER; note = bicyclic nucleic acid (BNA)
  modified_base 13: mod_base = OTHER; note = bicyclic nucleic acid (BNA)
  modified_base 18: mod_base = OTHER; note = bicyclic nucleic acid (BNA)
  source 1..18: mol_type = other DNA
ggtaagttctgtccaagc

SEQ ID NO: 13407 - DNA, 18 bp, synthetic construct
  misc_feature 1..18: note = Description of Artificial Sequence: Synthetic Antisense oligonucleotide
  modified_base 1: mod_base = OTHER; note = bicyclic nucleic acid (BNA)
  modified_base 14: mod_base = OTHER; note = bicyclic nucleic acid (BNA)
  modified_base 18: mod_base = OTHER; note = bicyclic nucleic acid (BNA)
  source 1..18: mol_type = other DNA
ggtaagttctgtccaagc

SEQ ID NO: 13408 - DNA, 18 bp, synthetic construct
  misc_feature 1..18: note = Description of Artificial Sequence: Synthetic Antisense oligonucleotide
  modified_base 1: mod_base = OTHER; note = bicyclic nucleic acid (BNA)
  modified_base 16: mod_base = OTHER; note = bicyclic nucleic acid (BNA)
  modified_base 18: mod_base = OTHER; note = bicyclic nucleic acid (BNA)
  source 1..18: mol_type = other DNA
gtaagttctgtccaagcc

SEQ ID NO: 13409 - DNA, 18 bp, synthetic construct
  misc_feature 1..18: note = Description of Artificial Sequence: Synthetic Antisense oligonucleotide
  modified_base 1: mod_base = OTHER; note = bicyclic nucleic acid (BNA)
  modified_base 10: mod_base = OTHER; note = bicyclic nucleic acid (BNA)
  modified_base 18: mod_base = OTHER; note = bicyclic nucleic acid (BNA)
  source 1..18: mol_type = other DNA
gtaagttctgtccaagcc

SEQ ID NO: 13410 - DNA, 18 bp, synthetic construct
  misc_feature 1..18: note = Description of Artificial Sequence: Synthetic Antisense oligonucleotide
  modified_base 1: mod_base = OTHER; note = bicyclic nucleic acid (BNA)
  modified_base 5: mod_base = OTHER; note = bicyclic nucleic acid (BNA)
  modified_base 18: mod_base = OTHER; note = bicyclic nucleic acid (BNA)
  source 1..18: mol_type = other DNA
gtaagttctgtccaagcc

SEQ ID NO: 13411 - DNA, 18 bp, synthetic construct
  misc_feature 1..18: note = Description of Artificial Sequence: Synthetic Antisense oligonucleotide
  modified_base 1: mod_base = OTHER; note = bicyclic nucleic acid (BNA)
  modified_base 17..18: mod_base = OTHER; note = bicyclic nucleic acid (BNA)
  source 1..18: mol_type = other DNA
gtaagttctgtccaagcc

SEQ ID NO: 13412 - DNA, 18 bp, synthetic construct
  misc_feature 1..18: note = Description of Artificial Sequence: Synthetic Antisense oligonucleotide
  modified_base 1: mod_base = OTHER; note = bicyclic nucleic acid (BNA)
  modified_base 12: mod_base = OTHER; note = bicyclic nucleic acid (BNA)
  modified_base 18: mod_base = OTHER; note = bicyclic nucleic acid (BNA)
  source 1..18: mol_type = other DNA
gtaagttctgtccaagcc

SEQ ID NO: 13413 - DNA, 18 bp, synthetic construct
  misc_feature 1..18: note = Description of Artificial Sequence: Synthetic Antisense oligonucleotide
  modified_base 1: mod_base = OTHER; note = bicyclic nucleic acid (BNA)
  modified_base 13: mod_base = OTHER; note = bicyclic nucleic acid (BNA)
  modified_base 18: mod_base = OTHER; note = bicyclic nucleic acid (BNA)
  source 1..18: mol_type = other DNA
gtaagttctgtccaagcc

SEQ ID NO: 13414 - DNA, 18 bp, synthetic construct
  misc_feature 1..18: note = Description of Artificial Sequence: Synthetic Antisense oligonucleotide
  modified_base 1: mod_base = OTHER; note = bicyclic nucleic acid (BNA)
  modified_base 8: mod_base = OTHER; note = bicyclic nucleic acid (BNA)
  modified_base 18: mod_base = OTHER; note = bicyclic nucleic acid (BNA)
  source 1..18: mol_type = other DNA
gtaagttctgtccaagcc

SEQ ID NO: 13415 - DNA, 18 bp, synthetic construct
  misc_feature 1..18: note = Description of Artificial Sequence: Synthetic Antisense oligonucleotide
  modified_base 1..2: mod_base = OTHER; note = bicyclic nucleic acid (BNA)
  modified_base 18: mod_base = OTHER; note = bicyclic nucleic acid (BNA)
  source 1..18: mol_type = other DNA
agtcggtaagttctgtcc

SEQ ID NO: 13416 - DNA, 18 bp, synthetic construct
  misc_feature 1..18: note = Description of Artificial Sequence: Synthetic Antisense oligonucleotide
  modified_base 1: mod_base = OTHER; note = bicyclic nucleic acid (BNA)
  modified_base 4: mod_base = OTHER; note = bicyclic nucleic acid (BNA)
  modified_base 18: mod_base = OTHER; note = bicyclic nucleic acid (BNA)
  source 1..18: mol_type = other DNA
agtcggtaagttctgtcc

SEQ ID NO: 13417 - DNA, 18 bp, synthetic construct
  misc_feature 1..18: note = Description of Artificial Sequence: Synthetic Antisense oligonucleotide
  modified_base 1: mod_base = OTHER; note = bicyclic nucleic acid (BNA)
  modified_base 10: mod_base = OTHER; note = bicyclic nucleic acid (BNA)
  modified_base 18: mod_base = OTHER; note = bicyclic nucleic acid (BNA)
  source 1..18: mol_type = other DNA
agtcggtaagttctgtcc

SEQ ID NO: 13418 - DNA, 18 bp, synthetic construct
  misc_feature 1..18: note = Description of Artificial Sequence: Synthetic Antisense oligonucleotide
  modified_base 1: mod_base = OTHER; note = bicyclic nucleic acid (BNA)
  modified_base 5: mod_base = OTHER; note = bicyclic nucleic acid (BNA)
  modified_base 18: mod_base = OTHER; note = bicyclic nucleic acid (BNA)
  source 1..18: mol_type = other DNA
agtcggtaagttctgtcc

SEQ ID NO: 13419 - DNA, 18 bp, synthetic construct
  misc_feature 1..18: note = Description of Artificial Sequence: Synthetic Antisense oligonucleotide
  modified_base 1: mod_base = OTHER; note = bicyclic nucleic acid (BNA)
  modified_base 6: mod_base = OTHER; note = bicyclic nucleic acid (BNA)
  modified_base 18: mod_base = OTHER; note = bicyclic nucleic acid (BNA)
  source 1..18: mol_type = other DNA
agtcggtaagttctgtcc

SEQ ID NO: 13420 - DNA, 18 bp, synthetic construct
  misc_feature 1..18: note = Description of Artificial Sequence: Synthetic Antisense oligonucleotide
  modified_base 1: mod_base = OTHER; note = bicyclic nucleic acid (BNA)
  modified_base 17..18: mod_base = OTHER; note = bicyclic nucleic acid (BNA)
  source 1..18: mol_type = other DNA
agtcggtaagttctgtcc

SEQ ID NO: 13421 - DNA, 18 bp, synthetic construct
  misc_feature 1..18: note = Description of Artificial Sequence: Synthetic Antisense oligonucleotide
  modified_base 1: mod_base = OTHER; note = bicyclic nucleic acid (BNA)
  modified_base 13: mod_base = OTHER; note = bicyclic nucleic acid (BNA)
  modified_base 18: mod_base = OTHER; note = bicyclic nucleic acid (BNA)
  source 1..18: mol_type = other DNA
agtcggtaagttctgtcc

SEQ ID NO: 13422 - DNA, 18 bp, synthetic construct
  misc_feature 1..18: note = Description of Artificial Sequence: Synthetic Antisense oligonucleotide
  modified_base 1: mod_base = OTHER; note = bicyclic nucleic acid (BNA)
  modified_base 15: mod_base = OTHER; note = bicyclic nucleic acid (BNA)
  modified_base 18: mod_base = OTHER; note = bicyclic nucleic acid (BNA)
  source 1..18: mol_type = other DNA
agtcggtaagttctgtcc

SEQ ID NO: 13423 - DNA, 18 bp, synthetic construct
  misc_feature 1..18: note = Description of Artificial Sequence: Synthetic Antisense oligonucleotide
  modified_base 1: mod_base = OTHER; note = bicyclic nucleic acid (BNA)
  modified_base 3: mod_base = OTHER; note = bicyclic nucleic acid (BNA)
  modified_base 18: mod_base = OTHER; note = bicyclic nucleic acid (BNA)
  source 1..18: mol_type = other DNA
ctgtccaagcccggttga

SEQ ID NO: 13424 - DNA, 18 bp, synthetic construct
  misc_feature 1..18: note = Description of Artificial Sequence: Synthetic Antisense oligonucleotide
  modified_base 1: mod_base = OTHER; note = bicyclic nucleic acid (BNA)
  modified_base 9: mod_base = OTHER; note = bicyclic nucleic acid (BNA)
  modified_base 18: mod_base = OTHER; note = bicyclic nucleic acid (BNA)
  source 1..18: mol_type = other DNA
ctgtccaagcccggttga

SEQ ID NO: 13425 - DNA, 18 bp, synthetic construct
  misc_feature 1..18: note = Description of Artificial Sequence: Synthetic Antisense oligonucleotide
  modified_base 1: mod_base = OTHER; note = bicyclic nucleic acid (BNA)
  modified_base 10: mod_base = OTHER; note = bicyclic nucleic acid (BNA)
  modified_base 18: mod_base = OTHER; note = bicyclic nucleic acid (BNA)
  source 1..18: mol_type = other DNA
ctgtccaagcccggttga

SEQ ID NO: 13426 - DNA, 18 bp, synthetic construct
  misc_feature 1..18: note = Description of Artificial Sequence: Synthetic Antisense oligonucleotide
  modified_base 1: mod_base = OTHER; note = bicyclic nucleic acid (BNA)
  modified_base 5: mod_base = OTHER; note = bicyclic nucleic acid (BNA)
  modified_base 18: mod_base = OTHER; note = bicyclic nucleic acid (BNA)
  source 1..18: mol_type = other DNA
ctgtccaagcccggttga

SEQ ID NO: 13427 - DNA, 18 bp, synthetic construct
  misc_feature 1..18: note = Description of Artificial Sequence: Synthetic Antisense oligonucleotide
  modified_base 1: mod_base = OTHER; note = bicyclic nucleic acid (BNA)
  modified_base 11: mod_base = OTHER; note = bicyclic nucleic acid (BNA)
  modified_base 18: mod_base = OTHER; note = bicyclic nucleic acid (BNA)
  source 1..18: mol_type = other DNA
ctgtccaagcccggttga

SEQ ID NO: 13428 - DNA, 18 bp, synthetic construct
  misc_feature 1..18: note = Description of Artificial Sequence: Synthetic Antisense oligonucleotide
  modified_base 1: mod_base = OTHER; note = bicyclic nucleic acid (BNA)
  modified_base 6: mod_base = OTHER; note = bicyclic nucleic acid (BNA)
  modified_base 18: mod_base = OTHER; note = bicyclic nucleic acid (BNA)
  source 1..18: mol_type = other DNA
ctgtccaagcccggttga

SEQ ID NO: 13429 - DNA, 18 bp, synthetic construct
  misc_feature 1..18: note = Description of Artificial Sequence: Synthetic Antisense oligonucleotide
  modified_base 1: mod_base = OTHER; note = bicyclic nucleic acid (BNA)
  modified_base 17..18: mod_base = OTHER; note = bicyclic nucleic acid (BNA)
  source 1..18: mol_type = other DNA
ctgtccaagcccggttga

SEQ ID NO: 13430 - DNA, 18 bp, synthetic construct
  misc_feature 1..18: note = Description of Artificial Sequence: Synthetic Antisense oligonucleotide
  modified_base 1: mod_base = OTHER; note = bicyclic nucleic acid (BNA)
  modified_base 12: mod_base = OTHER; note = bicyclic nucleic acid (BNA)
  modified_base 18: mod_base = OTHER; note = bicyclic nucleic acid (BNA)
  source 1..18: mol_type = other DNA
ctgtccaagcccggttga

SEQ ID NO: 13431 - DNA, 18 bp, synthetic construct
  misc_feature 1..18: note = Description of Artificial Sequence: Synthetic Antisense oligonucleotide
  modified_base 1: mod_base = OTHER; note = bicyclic nucleic acid (BNA)
  modified_base 13: mod_base = OTHER; note = bicyclic nucleic acid (BNA)
  modified_base 18: mod_base = OTHER; note = bicyclic nucleic acid (BNA)
  source 1..18: mol_type = other DNA
ctgtccaagcccggttga

SEQ ID NO: 13432 - DNA, 18 bp, synthetic construct
  misc_feature 1..18: note = Description of Artificial Sequence: Synthetic Antisense oligonucleotide
  modified_base 1: mod_base = OTHER; note = bicyclic nucleic acid (BNA)
  modified_base 14: mod_base = OTHER; note = bicyclic nucleic acid (BNA)
  modified_base 18: mod_base = OTHER; note = bicyclic nucleic acid (BNA)
  source 1..18: mol_type = other DNA
ctgtccaagcccggttga

SEQ ID NO: 13433 - DNA, 18 bp, synthetic construct
  misc_feature 1..18: note = Description of Artificial Sequence: Synthetic Antisense oligonucleotide
  modified_base 1: mod_base = OTHER; note = bicyclic nucleic acid (BNA)
  modified_base 9: mod_base = OTHER; note = bicyclic nucleic acid (BNA)
  modified_base 14: mod_base = OTHER; note = bicyclic nucleic acid (BNA)
  modified_base 18: mod_base = OTHER; note = bicyclic nucleic acid (BNA)
  source 1..18: mol_type = other DNA
ggtaagttctgtccaagc

SEQ ID NO: 13434 - DNA, 18 bp, synthetic construct
  misc_feature 1..18: note = Description of Artificial Sequence: Synthetic Antisense oligonucleotide
  modified_base 1: mod_base = OTHER; note = bicyclic nucleic acid (BNA)
  modified_base 6: mod_base = OTHER; note = bicyclic nucleic acid (BNA)
  modified_base 14: mod_base = OTHER; note = bicyclic nucleic acid (BNA)
  modified_base 18: mod_base = OTHER; note = bicyclic nucleic acid (BNA)
  source 1..18: mol_type = other DNA
ggtaagttctgtccaagc

SEQ ID NO: 13435 - DNA, 18 bp, synthetic construct
  misc_feature 1..18: note = Description of Artificial Sequence: Synthetic Antisense oligonucleotide
  modified_base 1: mod_base = OTHER; note = bicyclic nucleic acid (BNA)
  modified_base 13: mod_base = OTHER; note = bicyclic nucleic acid (BNA)
  modified_base 17..18: mod_base = OTHER; note = bicyclic nucleic acid (BNA)
  source 1..18: mol_type = other DNA
ggtaagttctgtccaagc

SEQ ID NO: 13436 - DNA, 18 bp, synthetic construct
  misc_feature 1..18: note = Description of Artificial Sequence: Synthetic Antisense oligonucleotide
  modified_base 1: mod_base = OTHER; note = bicyclic nucleic acid (BNA)
  modified_base 6: mod_base = OTHER; note = bicyclic nucleic acid (BNA)
  modified_base 9: mod_base = OTHER; note = bicyclic nucleic acid (BNA)
  modified_base 18: mod_base = OTHER; note = bicyclic nucleic acid (BNA)
  source 1..18: mol_type = other DNA
ggtaagttctgtccaagc

SEQ ID NO: 13437 - DNA, 18 bp, synthetic construct
  misc_feature 1..18: note = Description of Artificial Sequence: Synthetic Antisense oligonucleotide
  modified_base 1: mod_base = OTHER; note = bicyclic nucleic acid (BNA)
  modified_base 13..14: mod_base = OTHER; note = bicyclic nucleic acid (BNA)
  modified_base 18: mod_base = OTHER; note = bicyclic nucleic acid (BNA)
  source 1..18: mol_type = other DNA
ggtaagttctgtccaagc

SEQ ID NO: 13438 - DNA, 18 bp, synthetic construct
  misc_feature 1..18: note = Description of Artificial Sequence: Synthetic Antisense oligonucleotide
  modified_base 1..2: mod_base = OTHER; note = bicyclic nucleic acid (BNA)
  modified_base 17..18: mod_base = OTHER; note = bicyclic nucleic acid (BNA)
  source 1..18: mol_type = other DNA
ggtaagttctgtccaagc

SEQ ID NO: 13439 - DNA, 18 bp, synthetic construct
  misc_feature 1..18: note = Description of Artificial Sequence: Synthetic Antisense oligonucleotide
  modified_base 1: mod_base = OTHER; note = bicyclic nucleic acid (BNA)
  modified_base 6: mod_base = OTHER; note = bicyclic nucleic acid (BNA)
  modified_base 13: mod_base = OTHER; note = bicyclic nucleic acid (BNA)
  modified_base 18: mod_base = OTHER; note = bicyclic nucleic acid (BNA)
  source 1..18: mol_type = other DNA
ggtaagttctgtccaagc

SEQ ID NO: 13440 - DNA, 18 bp, synthetic construct
  misc_feature 1..18: note = Description of Artificial Sequence: Synthetic Antisense oligonucleotide
  modified_base 1: mod_base = OTHER; note = bicyclic nucleic acid (BNA)
  modified_base 9: mod_base = OTHER; note = bicyclic nucleic acid (BNA)
  modified_base 11: mod_base = OTHER; note = bicyclic nucleic acid (BNA)
  modified_base 18: mod_base = OTHER; note = bicyclic nucleic acid (BNA)
  source 1..18: mol_type = other DNA
ggtaagttctgtccaagc

SEQ ID NO: 13441 - DNA, 18 bp, synthetic construct
  misc_feature 1..18: note = Description of Artificial Sequence: Synthetic Antisense oligonucleotide
  modified_base 1: mod_base = OTHER; note = bicyclic nucleic acid (BNA)
  modified_base 14: mod_base = OTHER; note = bicyclic nucleic acid (BNA)
  modified_base 17..18: mod_base = OTHER; note = bicyclic nucleic acid (BNA)
  source 1..18: mol_type = other DNA
ggtaagttctgtccaagc

SEQ ID NO: 13442 - DNA, 18 bp, synthetic construct
  misc_feature 1..18: note = Description of Artificial Sequence: Synthetic Antisense oligonucleotide
  modified_base 1: mod_base = OTHER; note = bicyclic nucleic acid (BNA)
  modified_base 11: mod_base = OTHER; note = bicyclic nucleic acid (BNA)
  modified_base 13: mod_base = OTHER; note = bicyclic nucleic acid (BNA)
  modified_base 18: mod_base = OTHER; note = bicyclic nucleic acid (BNA)
  source 1..18: mol_type = other DNA
ggtaagttctgtccaagc

SEQ ID NO: 13443 - DNA, 18 bp, synthetic construct
  misc_feature 1..18: note = Description of Artificial Sequence: Synthetic Antisense oligonucleotide
  modified_base 1..2: mod_base = OTHER; note = bicyclic nucleic acid (BNA)
  modified_base 6: mod_base = OTHER; note = bicyclic nucleic acid (BNA)
  modified_base 18: mod_base = OTHER; note = bicyclic nucleic acid (BNA)
  source 1..18: mol_type = other DNA
ggtaagttctgtccaagc

SEQ ID NO: 13444 - DNA, 18 bp, synthetic construct
  misc_feature 1..18: note = Description of Artificial Sequence: Synthetic Antisense oligonucleotide
  modified_base 1..2: mod_base = OTHER; note = bicyclic nucleic acid (BNA)
  modified_base 11: mod_base = OTHER; note = bicyclic nucleic acid (BNA)
  modified_base 18: mod_base = OTHER; note = bicyclic nucleic acid (BNA)
  source 1..18: mol_type = other DNA
ggtaagttctgtccaagc

SEQ ID NO: 13445 - DNA, 18 bp, synthetic construct
  misc_feature 1..18: note = Description of Artificial Sequence: Synthetic Antisense oligonucleotide
  modified_base 1: mod_base = OTHER; note = bicyclic nucleic acid (BNA)
  modified_base 9: mod_base = OTHER; note = bicyclic nucleic acid (BNA)
  modified_base 17..18: mod_base = OTHER; note = bicyclic nucleic acid (BNA)
  source 1..18: mol_type = other DNA
ggtaagttctgtccaagc

SEQ ID NO: 13446 - DNA, 18 bp, synthetic construct
  misc_feature 1..18: note = Description of Artificial Sequence: Synthetic Antisense oligonucleotide
  modified_base 1..2: mod_base = OTHER; note = bicyclic nucleic acid (BNA)
  modified_base 14: mod_base = OTHER; note = bicyclic nucleic acid (BNA)
  modified_base 18: mod_base = OTHER; note = bicyclic nucleic acid (BNA)
  source 1..18: mol_type = other DNA
ggtaagttctgtccaagc

SEQ ID NO: 13447 - DNA, 18 bp, synthetic construct
  misc_feature 1..18: note = Description of Artificial Sequence: Synthetic Antisense oligonucleotide
  modified_base 1: mod_base = OTHER; note = bicyclic nucleic acid (BNA)
  modified_base 11: mod_base = OTHER; note = bicyclic nucleic acid (BNA)
  modified_base 14: mod_base = OTHER; note = bicyclic nucleic acid (BNA)
  modified_base 18: mod_base = OTHER; note = bicyclic nucleic acid (BNA)
  source 1..18: mol_type = other DNA
ggtaagttctgtccaagc

SEQ ID NO: 13448 - DNA, 18 bp, synthetic construct
  misc_feature 1..18: note = Description of Artificial Sequence: Synthetic Antisense oligonucleotide
  modified_base 1: mod_base = OTHER; note = bicyclic nucleic acid (BNA)
  modified_base 6: mod_base = OTHER; note = bicyclic nucleic acid (BNA)
  modified_base 11: mod_base = OTHER; note = bicyclic nucleic acid (BNA)
  modified_base 18: mod_base = OTHER; note = bicyclic nucleic acid (BNA)
  source 1..18: mol_type = other DNA
ggtaagttctgtccaagc

SEQ ID NO: 13449 - DNA, 18 bp, synthetic construct
  misc_feature 1..18: note = Description of Artificial Sequence: Synthetic Antisense oligonucleotide
  modified_base 1..2: mod_base = OTHER; note = bicyclic nucleic acid (BNA)
  modified_base 13: mod_base = OTHER; note = bicyclic nucleic acid (BNA)
  modified_base 18: mod_base = OTHER; note = bicyclic nucleic acid (BNA)
  source 1..18: mol_type = other DNA
ggtaagttctgtccaagc

SEQ ID NO: 13450 - DNA, 18 bp, synthetic construct
  misc_feature 1..18: note = Description of Artificial Sequence: Synthetic Antisense oligonucleotide
  modified_base 1: mod_base = OTHER; note = bicyclic nucleic acid (BNA)
  modified_base 9: mod_base = OTHER; note = bicyclic nucleic acid (BNA)
  modified_base 13: mod_base = OTHER; note = bicyclic nucleic acid (BNA)
  modified_base 18: mod_base = OTHER; note = bicyclic nucleic acid (BNA)
  source 1..18: mol_type = other DNA
ggtaagttctgtccaagc

SEQ ID NO: 13451 - DNA, 18 bp, synthetic construct
  misc_feature 1..18: note = Description of Artificial Sequence: Synthetic Antisense oligonucleotide
  modified_base 1: mod_base = OTHER; note = bicyclic nucleic acid (BNA)
  modified_base 6: mod_base = OTHER; note = bicyclic nucleic acid (BNA)
  modified_base 17..18: mod_base = OTHER; note = bicyclic nucleic acid (BNA)
  source 1..18: mol_type = other DNA
ggtaagttctgtccaagc

SEQ ID NO: 13452 - DNA, 18 bp, synthetic construct
  misc_feature 1..18: note = Description of Artificial Sequence: Synthetic Antisense oligonucleotide
  modified_base 1: mod_base = OTHER; note = bicyclic nucleic acid (BNA)
  modified_base 11: mod_base = OTHER; note = bicyclic nucleic acid (BNA)
  modified_base 17..18: mod_base = OTHER; note = bicyclic nucleic acid (BNA)
  source 1..18: mol_type = other DNA
ggtaagttctgtccaagc

SEQ ID NO: 13453 - DNA, 18 bp, synthetic construct
  misc_feature 1..18: note = Description of Artificial Sequence: Synthetic Antisense oligonucleotide
  modified_base 1..2: mod_base = OTHER; note = bicyclic nucleic acid (BNA)
  modified_base 9: mod_base = OTHER; note = bicyclic nucleic acid (BNA)
  modified_base 18: mod_base = OTHER; note = bicyclic nucleic acid (BNA)
  source 1..18: mol_type = other DNA
ggtaagttctgtccaagc

SEQ ID NO: 13454 - DNA, 18 bp, synthetic construct
  misc_feature 1..18: note = Description of Artificial Sequence: Synthetic Antisense oligonucleotide
  modified_base 1: mod_base = OTHER; note = bicyclic nucleic acid (BNA)
  modified_base 12: mod_base = OTHER; note = bicyclic nucleic acid (BNA)
  modified_base 17..18: mod_base = OTHER; note = bicyclic nucleic acid (BNA)
  source 1..18: mol_type = other DNA
gtaagttctgtccaagcc

SEQ ID NO: 13455 - DNA, 18 bp, synthetic construct
  misc_feature 1..18: note = Description of Artificial Sequence: Synthetic Antisense oligonucleotide
  modified_base 1: mod_base = OTHER; note = bicyclic nucleic acid (BNA)
  modified_base 5: mod_base = OTHER; note = bicyclic nucleic acid (BNA)
  modified_base 8: mod_base = OTHER; note = bicyclic nucleic acid (BNA)
  modified_base 18: mod_base = OTHER; note = bicyclic nucleic acid (BNA)
  source 1..18: mol_type = other DNA
gtaagttctgtccaagcc

SEQ ID NO: 13456 - DNA, 18 bp, synthetic construct
  misc_feature 1..18: note = Description of Artificial Sequence: Synthetic Antisense oligonucleotide
  modified_base 1: mod_base = OTHER; note = bicyclic nucleic acid (BNA)
  modified_base 8: mod_base = OTHER; note = bicyclic nucleic acid (BNA)
  modified_base 13: mod_base = OTHER; note = bicyclic nucleic acid (BNA)
  modified_base 18: mod_base = OTHER; note = bicyclic nucleic acid (BNA)
  source 1..18: mol_type = other DNA
gtaagttctgtccaagcc

SEQ ID NO: 13457 - DNA, 18 bp, synthetic construct
  misc_feature 1..18: note = Description of Artificial Sequence: Synthetic Antisense oligonucleotide
  modified_base 1: mod_base = OTHER; note = bicyclic nucleic acid (BNA)
  modified_base 5: mod_base = OTHER; note = bicyclic nucleic acid (BNA)
  modified_base 13: mod_base = OTHER; note = bicyclic nucleic acid (BNA)
  modified_base 18: mod_base = OTHER; note = bicyclic nucleic acid (BNA)
  source 1..18: mol_type = other DNA
gtaagttctgtccaagcc

SEQ ID NO: 13458 - DNA, 18 bp, synthetic construct
  misc_feature 1..18: note = Description of Artificial Sequence: Synthetic Antisense oligonucleotide
  modified_base 1: mod_base = OTHER; note = bicyclic nucleic acid (BNA)
  modified_base 8: mod_base = OTHER; note = bicyclic nucleic acid (BNA)
  modified_base 17..18: mod_base = OTHER; note = bicyclic nucleic acid (BNA)
  source 1..18: mol_type = other DNA
gtaagttctgtccaagcc

SEQ ID NO: 13459 - DNA, 18 bp, synthetic construct
  misc_feature 1..18: note = Description of Artificial Sequence: Synthetic Antisense oligonucleotide
  modified_base 1: mod_base = OTHER; note = bicyclic nucleic acid (BNA)
  modified_base 13: mod_base = OTHER; note = bicyclic nucleic acid (BNA)
  modified_base 17..18: mod_base = OTHER; note = bicyclic nucleic acid (BNA)
  source 1..18: mol_type = other DNA
gtaagttctgtccaagcc

SEQ ID NO: 13460 - DNA, 18 bp, synthetic construct
  misc_feature 1..18: note = Description of Artificial Sequence: Synthetic Antisense oligonucleotide
  modified_base 1: mod_base = OTHER; note = bicyclic nucleic acid (BNA)
  modified_base 8: mod_base = OTHER; note = bicyclic nucleic acid (BNA)
  modified_base 12: mod_base = OTHER; note = bicyclic nucleic acid (BNA)
  modified_base 18: mod_base = OTHER; note = bicyclic nucleic acid (BNA)
  source 1..18: mol_type = other DNA
gtaagttctgtccaagcc

SEQ ID NO: 13461 - DNA, 18 bp, synthetic construct
  misc_feature 1..18: note = Description of Artificial Sequence: Synthetic Antisense oligonucleotide
  modified_base 1: mod_base = OTHER; note = bicyclic nucleic acid (BNA)
  modified_base 5: mod_base = OTHER; note = bicyclic nucleic acid (BNA)
  modified_base 10: mod_base = OTHER; note = bicyclic nucleic acid (BNA)
  modified_base 18: mod_base = OTHER; note = bicyclic nucleic acid (BNA)
  source 1..18: mol_type = other DNA
gtaagttctgtccaagcc

SEQ ID NO: 13462 - DNA, 18 bp, synthetic construct
  misc_feature 1..18: note = Description of Artificial Sequence: Synthetic Antisense oligonucleotide
  modified_base 1: mod_base = OTHER; note = bicyclic nucleic acid (BNA)
  modified_base 8: mod_base = OTHER; note = bicyclic nucleic acid (BNA)
  modified_base 16: mod_base = OTHER; note = bicyclic nucleic acid (BNA)
  modified_base 18: mod_base = OTHER; note = bicyclic nucleic acid (BNA)
  source 1..18: mol_type = other DNA
gtaagttctgtccaagcc

SEQ ID NO: 13463 - DNA, 18 bp, synthetic construct
  misc_feature 1..18: note = Description of Artificial Sequence: Synthetic Antisense oligonucleotide
  modified_base 1: mod_base = OTHER; note = bicyclic nucleic acid (BNA)
  modified_base 10: mod_base = OTHER; note = bicyclic nucleic acid (BNA)
  modified_base 16: mod_base = OTHER; note = bicyclic nucleic acid (BNA)
  modified_base 18: mod_base = OTHER; note = bicyclic nucleic acid (BNA)
  source 1..18: mol_type = other DNA
gtaagttctgtccaagcc

SEQ ID NO: 13464 - DNA, 18 bp, synthetic construct
  misc_feature 1..18: note = Description of Artificial Sequence: Synthetic Antisense oligonucleotide
  modified_base 1: mod_base = OTHER; note = bicyclic nucleic acid (BNA)
  modified_base 10: mod_base = OTHER; note = bicyclic nucleic acid (BNA)
  modified_base 12: mod_base = OTHER; note = bicyclic nucleic acid (BNA)
  modified_base 18: mod_base = OTHER; note = bicyclic nucleic acid (BNA)
  source 1..18: mol_type = other DNA
gtaagttctgtccaagcc

SEQ ID NO: 13465 - DNA, 18 bp, synthetic construct
  misc_feature 1..18: note = Description of Artificial Sequence: Synthetic Antisense oligonucleotide
  modified_base 1: mod_base = OTHER; note = bicyclic nucleic acid (BNA)
  modified_base 5: mod_base = OTHER; note = bicyclic nucleic acid (BNA)
  modified_base 17..18: mod_base = OTHER; note = bicyclic nucleic acid (BNA)
  source 1..18: mol_type = other DNA
gtaagttctgtccaagcc

SEQ ID NO: 13466 - DNA, 18 bp, synthetic construct
  misc_feature 1..18: note = Description of Artificial Sequence: Synthetic Antisense oligonucleotide
  modified_base 1: mod_base = OTHER; note = bicyclic nucleic acid (BNA)
  modified_base 10: mod_base = OTHER; note = bicyclic nucleic acid (BNA)
  modified_base 17..18: mod_base = OTHER; note = bicyclic nucleic acid (BNA)
  source 1..18: mol_type = other DNA
gtaagttctgtccaagcc

SEQ ID NO: 13467 - DNA, 18 bp, synthetic construct
  misc_feature 1..18: note = Description of Artificial Sequence: Synthetic Antisense oligonucleotide
  modified_base 1: mod_base = OTHER; note = bicyclic nucleic acid (BNA)
  modified_base 12..13: mod_base = OTHER; note = bicyclic nucleic acid (BNA)
  modified_base 18: mod_base = OTHER; note = bicyclic nucleic acid (BNA)
  source 1..18: mol_type = other DNA
gtaagttctgtccaagcc

SEQ ID NO: 13468 - DNA, 18 bp, synthetic construct
  misc_feature 1..18: note = Description of Artificial Sequence: Synthetic Antisense oligonucleotide
  modified_base 1: mod_base = OTHER; note = bicyclic nucleic acid (BNA)
  modified_base 5: mod_base = OTHER; note = bicyclic nucleic acid (BNA)
  modified_base 12: mod_base = OTHER; note = bicyclic nucleic acid (BNA)
  modified_base 18: mod_base = OTHER; note = bicyclic nucleic acid (BNA)
  source 1..18: mol_type = other DNA
gtaagttctgtccaagcc

SEQ ID NO: 13469 - DNA, 18 bp, synthetic construct
  misc_feature 1..18: note = Description of Artificial Sequence: Synthetic Antisense oligonucleotide
  modified_base 1: mod_base = OTHER; note = bicyclic nucleic acid (BNA)
  modified_base 8: mod_base = OTHER; note = bicyclic nucleic acid (BNA)
  modified_base 10: mod_base = OTHER; note = bicyclic nucleic acid (BNA)
  modified_base 18: mod_base = OTHER; note = bicyclic nucleic acid (BNA)
  source 1..18: mol_type = other DNA
gtaagttctgtccaagcc

SEQ ID NO: 13470 - DNA, 18 bp, synthetic construct
  misc_feature 1..18: note = Description of Artificial Sequence: Synthetic Antisense oligonucleotide
  modified_base 1: mod_base = OTHER; note = bicyclic nucleic acid (BNA)
  modified_base 13: mod_base = OTHER; note = bicyclic nucleic acid (BNA)
  modified_base 16: mod_base = OTHER; note = bicyclic nucleic acid (BNA)
  modified_base 18: mod_base = OTHER; note = bicyclic nucleic acid (BNA)
  source 1..18: mol_type = other DNA
gtaagttctgtccaagcc

SEQ ID NO: 13471 - DNA, 18 bp, synthetic construct
  misc_feature 1..18: note = Description of Artificial Sequence: Synthetic Antisense oligonucleotide
  modified_base 1: mod_base = OTHER; note = bicyclic nucleic acid (BNA)
  modified_base 5: mod_base = OTHER; note = bicyclic nucleic acid (BNA)
  modified_base 16: mod_base = OTHER; note = bicyclic nucleic acid (BNA)
  modified_base 18: mod_base = OTHER; note = bicyclic nucleic acid (BNA)
  source 1..18: mol_type = other DNA
gtaagttctgtccaagcc

SEQ ID NO: 13472 - DNA, 18 bp, synthetic construct
  misc_feature 1..18: note = Description of Artificial Sequence: Synthetic Antisense oligonucleotide
  modified_base 1: mod_base = OTHER; note = bicyclic nucleic acid (BNA)
  modified_base 12: mod_base = OTHER; note = bicyclic nucleic acid (BNA)
  modified_base 16: mod_base = OTHER; note = bicyclic nucleic acid (BNA)
  modified_base 18: mod_base = OTHER; note = bicyclic nucleic acid (BNA)
  source 1..18: mol_type = other DNA
gtaagttctgtccaagcc

SEQ ID NO: 13473 - DNA, 18 bp, synthetic construct
  misc_feature 1..18: note = Description of Artificial Sequence: Synthetic Antisense oligonucleotide
  modified_base 1: mod_base = OTHER; note = bicyclic nucleic acid (BNA)
  modified_base 16..18: mod_base = OTHER; note = bicyclic nucleic acid (BNA)
  source 1..18: mol_type = other DNA
gtaagttctgtccaagcc

SEQ ID NO: 13474 - DNA, 18 bp, synthetic construct
  misc_feature 1..18: note = Description of Artificial Sequence: Synthetic Antisense oligonucleotide
  modified_base 1: mod_base = OTHER; note = bicyclic nucleic acid (BNA)
  modified_base 10: mod_base = OTHER; note = bicyclic nucleic acid (BNA)
  modified_base 13: mod_base = OTHER; note = bicyclic nucleic acid (BNA)
  modified_base 18: mod_base = OTHER; note = bicyclic nucleic acid (BNA)
  source 1..18: mol_type = other DNA
gtaagttctgtccaagcc

SEQ ID NO: 13475 - DNA, 18 bp, synthetic construct
  misc_feature 1..18: note = Description of Artificial Sequence: Synthetic Antisense oligonucleotide
  modified_base 1: mod_base = OTHER; note = bicyclic nucleic acid (BNA)
  modified_base 6: mod_base = OTHER; note = bicyclic nucleic acid (BNA)
  modified_base 10: mod_base = OTHER; note = bicyclic nucleic acid (BNA)
  modified_base 18: mod_base = OTHER; note = bicyclic nucleic acid (BNA)
  source 1..18: mol_type = other DNA
agtcggtaagttctgtcc

SEQ ID NO: 13476 - DNA, 18 bp, synthetic construct
  misc_feature 1..18: note = Description of Artificial Sequence: Synthetic Antisense oligonucleotide
  modified_base 1..2: mod_base = OTHER; note = bicyclic nucleic acid (BNA)
  modified_base 4: mod_base = OTHER; note = bicyclic nucleic acid (BNA)
  modified_base 18: mod_base = OTHER; note = bicyclic nucleic acid (BNA)
  source 1..18: mol_type = other DNA
agtcggtaagttctgtcc

SEQ ID NO: 13477 - DNA, 18 bp, synthetic construct
  misc_feature 1..18: note = Description of Artificial Sequence: Synthetic Antisense oligonucleotide
  modified_base 1: mod_base = OTHER; note = bicyclic nucleic acid (BNA)
  modified_base 5: mod_base = OTHER; note = bicyclic nucleic acid (BNA)
  modified_base 13: mod_base = OTHER; note = bicyclic nucleic acid (BNA)
  modified_base 18: mod_base = OTHER; note = bicyclic nucleic acid (BNA)
  source 1..18: mol_type = other DNA
agtcggtaagttctgtcc

SEQ ID NO: 13478 - DNA, 18 bp, synthetic construct
  misc_feature 1..18: note = Description of Artificial Sequence: Synthetic Antisense oligonucleotide
  modified_base 1: mod_base = OTHER; note = bicyclic nucleic acid (BNA)
  modified_base 13: mod_base = OTHER; note = bicyclic nucleic acid (BNA)
  modified_base 17..18: mod_base = OTHER; note = bicyclic nucleic acid (BNA)
  source 1..18: mol_type = other DNA
agtcggtaagttctgtcc

SEQ ID NO: 13479 - DNA, 18 bp, synthetic construct
  misc_feature 1..18: note = Description of Artificial Sequence: Synthetic Antisense oligonucleotide
  modified_base 1: mod_base = OTHER; note = bicyclic nucleic acid (BNA)
  modified_base 4: mod_base = OTHER; note = bicyclic nucleic acid (BNA)
  modified_base 15: mod_base = OTHER; note = bicyclic nucleic acid (BNA)
  modified_base 18: mod_base = OTHER; note = bicyclic nucleic acid (BNA)
  source 1..18: mol_type = other DNA
agtcggtaagttctgtcc

SEQ ID NO: 13480 - DNA, 18 bp, synthetic construct
  misc_feature 1..18: note = Description of Artificial Sequence: Synthetic Antisense oligonucleotide
  modified_base 1: mod_base = OTHER; note = bicyclic nucleic acid (BNA)
  modified_base 5: mod_base = OTHER; note = bicyclic nucleic acid (BNA)
  modified_base 10: mod_base = OTHER; note = bicyclic nucleic acid (BNA)
  modified_base 18: mod_base = OTHER; note = bicyclic nucleic acid (BNA)
  source 1..18: mol_type = other DNA
agtcggtaagttctgtcc

SEQ ID NO: 13481 - DNA, 18 bp, synthetic construct
  misc_feature 1..18: note = Description of Artificial Sequence: Synthetic Antisense oligonucleotide
  modified_base 1..2: mod_base = OTHER; note = bicyclic nucleic acid (BNA)
  modified_base 17..18: mod_base = OTHER; note = bicyclic nucleic acid (BNA)
  source 1..18: mol_type = other DNA
agtcggtaagttctgtcc

SEQ ID NO: 13482 - DNA, 18 bp, synthetic construct
  misc_feature 1..18: note = Description of Artificial Sequence: Synthetic Antisense oligonucleotide
  modified_base 1: mod_base = OTHER; note = bicyclic nucleic acid (BNA)
  modified_base 6: mod_base = OTHER; note = bicyclic nucleic acid (BNA)
  modified_base 13: mod_base = OTHER; note = bicyclic nucleic acid (BNA)
  modified_base 18: mod_base = OTHER; note = bicyclic nucleic acid (BNA)
  source 1..18: mol_type = other DNA
agtcggtaagttctgtcc

SEQ ID NO: 13483 - DNA, 18 bp, synthetic construct
  misc_feature 1..18: note = Description of Artificial Sequence: Synthetic Antisense oligonucleotide
  modified_base 1..2: mod_base = OTHER; note = bicyclic nucleic acid (BNA)
  modified_base 15: mod_base = OTHER; note = bicyclic nucleic acid (BNA)
  modified_base 18: mod_base = OTHER; note = bicyclic nucleic acid (BNA)
  source 1..18: mol_type = other DNA
agtcggtaagttctgtcc

SEQ ID NO: 13484 - DNA, 18 bp, synthetic construct
  misc_feature 1..18: note = Description of Artificial Sequence: Synthetic Antisense oligonucleotide
  modified_base 1..2: mod_base = OTHER; note = bicyclic nucleic acid (BNA)
  modified_base 6: mod_base = OTHER; note = bicyclic nucleic acid (BNA)
  modified_base 18: mod_base = OTHER; note = bicyclic nucleic acid (BNA)
  source 1..18: mol_type = other DNA
agtcggtaagttctgtcc

SEQ ID NO: 13485 - DNA, 18 bp, synthetic construct
  misc_feature 1..18: note = Description of Artificial Sequence: Synthetic Antisense oligonucleotide
  modified_base 1: mod_base = OTHER; note = bicyclic nucleic acid (BNA)
  modified_base 4: mod_base = OTHER; note = bicyclic nucleic acid (BNA)
  modified_base 17..18: mod_base = OTHER; note = bicyclic nucleic acid (BNA)
  source 1..18: mol_type = other DNA
agtcggtaagttctgtcc

SEQ ID NO: 13486 - DNA, 18 bp, synthetic construct
  misc_feature 1..18: note = Description of Artificial Sequence: Synthetic Antisense oligonucleotide
  modified_base 1: mod_base = OTHER; note = bicyclic nucleic acid (BNA)
  modified_base 10: mod_base = OTHER; note = bicyclic nucleic acid (BNA)
  modified_base 15: mod_base = OTHER; note = bicyclic nucleic acid (BNA)
  modified_base 18: mod_base = OTHER; note = bicyclic nucleic acid (BNA)
  source 1..18: mol_type = other DNA
agtcggtaagttctgtcc

SEQ ID NO: 13487 - DNA, 18 bp, synthetic construct
  misc_feature 1..18: note = Description of Artificial Sequence: Synthetic Antisense oligonucleotide
  modified_base 1: mod_base = OTHER; note = bicyclic nucleic acid (BNA)
  modified_base 13: mod_base = OTHER; note = bicyclic nucleic acid (BNA)
  modified_base 15: mod_base = OTHER; note = bicyclic nucleic acid (BNA)
  modified_base 18: mod_base = OTHER; note = bicyclic nucleic acid (BNA)
  source 1..18: mol_type = other DNA
agtcggtaagttctgtcc

SEQ ID NO: 13488 - DNA, 18 bp, synthetic construct
  misc_feature 1..18: note = Description of Artificial Sequence: Synthetic Antisense oligonucleotide
  modified_base 1: mod_base = OTHER; note = bicyclic nucleic acid (BNA)
  modified_base 5..6: mod_base = OTHER; note = bicyclic nucleic acid (BNA)
  modified_base 18: mod_base = OTHER; note = bicyclic nucleic acid (BNA)
  source 1..18: mol_type = other DNA
agtcggtaagttctgtcc

SEQ ID NO: 13489 - DNA, 18 bp, synthetic construct
  misc_feature 1..18: note = Description of Artificial Sequence: Synthetic Antisense oligonucleotide
  modified_base 1: mod_base = OTHER; note = bicyclic nucleic acid (BNA)
  modified_base 5: mod_base = OTHER; note = bicyclic nucleic acid (BNA)
  modified_base 15: mod_base = OTHER; note = bicyclic nucleic acid (BNA)
  modified_base 18: mod_base = OTHER; note = bicyclic nucleic acid (BNA)
  source 1..18: mol_type = other DNA
agtcggtaagttctgtcc

SEQ ID NO: 13490 - DNA, 18 bp, synthetic construct
  misc_feature 1..18: note = Description of Artificial Sequence: Synthetic Antisense oligonucleotide
  modified_base 1..2: mod_base = OTHER; note = bicyclic nucleic acid (BNA)
  modified_base 5: mod_base = OTHER; note = bicyclic nucleic acid (BNA)
  modified_base 18: mod_base = OTHER; note = bicyclic nucleic acid (BNA)
  source 1..18: mol_type = other DNA
agtcggtaagttctgtcc

SEQ ID NO: 13491 - DNA, 18 bp, synthetic construct
  misc_feature 1..18: note = Description of Artificial Sequence: Synthetic Antisense oligonucleotide
  modified_base 1: mod_base = OTHER; note = bicyclic nucleic acid (BNA)
  modified_base 5: mod_base = OTHER; note = bicyclic nucleic acid (BNA)
  modified_base 17..18: mod_base = OTHER; note = bicyclic nucleic acid (BNA)
  source 1..18: mol_type = other DNA
agtcggtaagttctgtcc

SEQ ID NO: 13492 - DNA, 18 bp, synthetic construct
  misc_feature 1..18: note = Description of Artificial Sequence: Synthetic Antisense oligonucleotide
  modified_base 1: mod_base = OTHER; note = bicyclic nucleic acid (BNA)
  modified_base 10: mod_base = OTHER; note = bicyclic nucleic acid (BNA)
  modified_base 17..18: mod_base = OTHER; note = bicyclic nucleic acid (BNA)
  source 1..18: mol_type = other DNA
agtcggtaagttctgtcc

SEQ ID NO: 13493 - DNA, 18 bp, synthetic construct
  misc_feature 1..18: note = Description of Artificial Sequence: Synthetic Antisense oligonucleotide
  modified_base 1: mod_base = OTHER; note = bicyclic nucleic acid (BNA)
  modified_base 4: mod_base = OTHER; note = bicyclic nucleic acid (BNA)
  modified_base 10: mod_base = OTHER; note = bicyclic nucleic acid (BNA)
  modified_base 18: mod_base = OTHER; note = bicyclic nucleic acid (BNA)
  source 1..18: mol_type = other DNA
agtcggtaagttctgtcc

SEQ ID NO: 13494 - DNA, 18 bp, synthetic construct
  misc_feature 1..18: note = Description of Artificial Sequence: Synthetic Antisense oligonucleotide
  modified_base 1..2: mod_base = OTHER; note = bicyclic nucleic acid (BNA)
  modified_base 10: mod_base = OTHER; note = bicyclic nucleic acid (BNA)
  modified_base 18: mod_base = OTHER; note = bicyclic nucleic acid (BNA)
  source 1..18: mol_type = other DNA
agtcggtaagttctgtcc

SEQ ID NO: 13495 - DNA, 18 bp, synthetic construct
  misc_feature 1..18: note = Description of Artificial Sequence: Synthetic Antisense oligonucleotide
  modified_base 1: mod_base = OTHER; note = bicyclic nucleic acid (BNA)
  modified_base 4: mod_base = OTHER; note = bicyclic nucleic acid (BNA)
  modified_base 6: mod_base = OTHER; note = bicyclic nucleic acid (BNA)
  modified_base 18: mod_base = OTHER; note = bicyclic nucleic acid (BNA)
  source 1..18: mol_type = other DNA
agtcggtaagttctgtcc

SEQ ID NO: 13496 - DNA, 18 bp, synthetic construct
  misc_feature 1..18: note = Description of Artificial Sequence: Synthetic Antisense oligonucleotide
  modified_base 1: mod_base = OTHER; note = bicyclic nucleic acid (BNA)
  modified_base 4: mod_base = OTHER; note = bicyclic nucleic acid (BNA)
  modified_base 13: mod_base = OTHER; note = bicyclic nucleic acid (BNA)
  modified_base 18: mod_base = OTHER; note = bicyclic nucleic acid (BNA)
  source 1..18: mol_type = other DNA
agtcggtaagttctgtcc

SEQ ID NO: 13497 - DNA, 18 bp, synthetic construct
  misc_feature 1..18: note = Description of Artificial Sequence: Synthetic Antisense oligonucleotide
  modified_base 1: mod_base = OTHER; note = bicyclic nucleic acid (BNA)
  modified_base 15: mod_base = OTHER; note = bicyclic nucleic acid (BNA)
  modified_base 17..18: mod_base = OTHER; note = bicyclic nucleic acid (BNA)
  source 1..18: mol_type = other DNA
agtcggtaagttctgtcc

SEQ ID NO: 13498 - DNA, 18 bp, synthetic construct
  misc_feature 1..18: note = Description of Artificial Sequence: Synthetic Antisense oligonucleotide
  modified_base 1..2: mod_base = OTHER; note = bicyclic nucleic acid (BNA)
  modified_base 13: mod_base = OTHER; note = bicyclic nucleic acid (BNA)
  modified_base 18: mod_base = OTHER; note = bicyclic nucleic acid (BNA)
  source 1..18: mol_type = other DNA
agtcggtaagttctgtcc

SEQ ID NO: 13499 - DNA, 18 bp, synthetic construct
  misc_feature 1..18: note = Description of Artificial Sequence: Synthetic Antisense oligonucleotide
  modified_base 1: mod_base = OTHER; note = bicyclic nucleic acid (BNA)
  modified_base 6: mod_base = OTHER; note = bicyclic nucleic acid (BNA)
  modified_base 17..18: mod_base = OTHER; note = bicyclic nucleic acid (BNA)
  source 1..18: mol_type = other DNA
agtcggtaagttctgtcc

SEQ ID NO: 13500 - DNA, 18 bp, synthetic construct
  misc_feature 1..18: note = Description of Artificial Sequence: Synthetic Antisense oligonucleotide
  modified_base 1: mod_base = OTHER; note = bicyclic nucleic acid (BNA)
  modified_base 6: mod_base = OTHER; note = bicyclic nucleic acid (BNA)
  modified_base 15: mod_base = OTHER; note = bicyclic nucleic acid (BNA)
  modified_base 18: mod_base = OTHER; note = bicyclic nucleic acid (BNA)
  source 1..18: mol_type = other DNA
agtcggtaagttctgtcc

SEQ ID NO: 13501 - DNA, 18 bp, synthetic construct
  misc_feature 1..18: note = Description of Artificial Sequence: Synthetic Antisense oligonucleotide
  modified_base 1: mod_base = OTHER; note = bicyclic nucleic acid (BNA)
  modified_base 4..5: mod_base = OTHER; note = bicyclic nucleic acid (BNA)
  modified_base 18: mod_base = OTHER; note = bicyclic nucleic acid (BNA)
  source 1..18: mol_type = other DNA
agtcggtaagttctgtcc

SEQ ID NO: 13502 - DNA, 18 bp, synthetic construct
  misc_feature 1..18: note = Description of Artificial Sequence: Synthetic Antisense oligonucleotide
  modified_base 1: mod_base = OTHER; note = bicyclic nucleic acid (BNA)
  modified_base 10: mod_base = OTHER; note = bicyclic nucleic acid (BNA)
  modified_base 13: mod_base = OTHER; note = bicyclic nucleic acid (BNA)
  modified_base 18: mod_base = OTHER; note = bicyclic nucleic acid (BNA)
  source 1..18: mol_type = other DNA
agtcggtaagttctgtcc

SEQ ID NO: 13503 - DNA, 18 bp, synthetic construct
  misc_feature 1..18: note = Description of Artificial Sequence: Synthetic Antisense oligonucleotide
  modified_base 1: mod_base = OTHER; note = bicyclic nucleic acid (BNA)
  modified_base 12: mod_base = OTHER; note = bicyclic nucleic acid (BNA)
  modified_base 17..18: mod_base = OTHER; note = bicyclic nucleic acid (BNA)
  source 1..18: mol_type = other DNA
ctgtccaagcccggttga

SEQ ID NO: 13504 - DNA, 18 bp, synthetic construct
  misc_feature 1..18: note = Description of Artificial Sequence: Synthetic Antisense oligonucleotide
  modified_base 1: mod_base = OTHER; note = bicyclic nucleic acid (BNA)
  modified_base 6: mod_base = OTHER; note = bicyclic nucleic acid (BNA)
  modified_base 10: mod_base = OTHER; note = bicyclic nucleic acid (BNA)
  modified_base 18: mod_base = OTHER; note = bicyclic nucleic acid (BNA)
  source 1..18: mol_type = other DNA
ctgtccaagcccggttga

SEQ ID NO: 13505 - DNA, 18 bp, synthetic construct
  misc_feature 1..18: note = Description of Artificial Sequence: Synthetic Antisense oligonucleotide
  modified_base 1: mod_base = OTHER; note = bicyclic nucleic acid (BNA)
  modified_base 9: mod_base = OTHER; note = bicyclic nucleic acid (BNA)
  modified_base 14: mod_base = OTHER; note = bicyclic nucleic acid (BNA)
  modified_base 18: mod_base = OTHER; note = bicyclic nucleic acid (BNA)
  source 1..18: mol_type = other DNA
ctgtccaagcccggttga

SEQ ID NO: 13506 - DNA, 18 bp, synthetic construct
  misc_feature 1..18: note = Description of Artificial Sequence: Synthetic Antisense oligonucleotide
  modified_base 1: mod_base = OTHER; note = bicyclic nucleic acid (BNA)
  modified_base 11..12: mod_base = OTHER; note = bicyclic nucleic acid (BNA)
  modified_base 18: mod_base = OTHER; note = bicyclic nucleic acid (BNA)
  source 1..18: mol_type = other DNA
ctgtccaagcccggttga

SEQ ID NO: 13507 - DNA, 18 bp, synthetic construct
  misc_feature 1..18: note = Description of Artificial Sequence: Synthetic Antisense oligonucleotide
  modified_base 1: mod_base = OTHER; note = bicyclic nucleic acid (BNA)
  modified_base 5: mod_base = OTHER; note = bicyclic nucleic acid (BNA)
  modified_base 9: mod_base = OTHER; note = bicyclic nucleic acid (BNA)
  modified_base 18: mod_base = OTHER; note = bicyclic nucleic acid (BNA)
  source 1..18: mol_type = other DNA
ctgtccaagcccggttga

SEQ ID NO: 13508 - DNA, 18 bp, synthetic construct
  misc_feature 1..18: note = Description of Artificial Sequence: Synthetic Antisense oligonucleotide
  modified_base 1: mod_base = OTHER; note = bicyclic nucleic acid (BNA)
  modified_base 3: mod_base = OTHER; note = bicyclic nucleic acid (BNA)
  modified_base 9: mod_base = OTHER; note = bicyclic nucleic acid (BNA)
  modified_base 18: mod_base = OTHER; note = bicyclic nucleic acid (BNA)
  source 1..18: mol_type = other DNA
ctgtccaagcccggttga

SEQ ID NO: 13509 - DNA, 18 bp, synthetic construct
  misc_feature 1..18: note = Description of Artificial Sequence: Synthetic Antisense oligonucleotide
  modified_base 1: mod_base = OTHER; note = bicyclic nucleic acid (BNA)
  modified_base 6: mod_base = OTHER; note = bicyclic nucleic acid (BNA)
  modified_base 14: mod_base = OTHER; note = bicyclic nucleic acid (BNA)
  modified_base 18: mod_base = OTHER; note = bicyclic nucleic acid (BNA)
  source 1..18: mol_type = other DNA
ctgtccaagcccggttga

SEQ ID NO: 13510 - DNA, 18 bp, synthetic construct
  misc_feature 1..18: note = Description of Artificial Sequence: Synthetic Antisense oligonucleotide
  modified_base 1: mod_base = OTHER; note = bicyclic nucleic acid (BNA)
  modified_base 9..10: mod_base = OTHER; note = bicyclic nucleic acid (BNA)
  modified_base 18: mod_base = OTHER; note = bicyclic nucleic acid (BNA)
  source 1..18: mol_type = other DNA
ctgtccaagcccggttga

SEQ ID NO: 13511 - DNA, 18 bp, synthetic construct
  misc_feature 1..18: note = Description of Artificial Sequence: Synthetic Antisense oligonucleotide
  modified_base 1: mod_base = OTHER; note = bicyclic nucleic acid (BNA)
  modified_base 5: mod_base = OTHER; note = bicyclic nucleic acid (BNA)
  modified_base 13: mod_base = OTHER; note = bicyclic nucleic acid (BNA)
  modified_base 18: mod_base = OTHER; note = bicyclic nucleic acid (BNA)
  source 1..18: mol_type = other DNA
ctgtccaagcccggttga

SEQ ID NO: 13512 - DNA, 18 bp, synthetic construct
  misc_feature 1..18: note = Description of Artificial Sequence: Synthetic Antisense oligonucleotide
  modified_base 1: mod_base = OTHER; note = bicyclic nucleic acid (BNA)
  modified_base 3: mod_base = OTHER; note = bicyclic nucleic acid (BNA)
  modified_base 13: mod_base = OTHER; note = bicyclic nucleic acid (BNA)
  modified_base 18: mod_base = OTHER; note = bicyclic nucleic acid (BNA)
  source 1..18: mol_type = other DNA
ctgtccaagcccggttga

SEQ ID NO: 13513 - DNA, 18 bp, synthetic construct
  misc_feature 1..18: note = Description of Artificial Sequence: Synthetic Antisense oligonucleotide
  modified_base 1: mod_base = OTHER; note = bicyclic nucleic acid (BNA)
  modified_base 13: mod_base = OTHER; note = bicyclic nucleic acid (BNA)
  modified_base 17..18: mod_base = OTHER; note = bicyclic nucleic acid (BNA)
  source 1..18: mol_type = other DNA
ctgtccaagcccggttga

SEQ ID NO: 13514 - DNA, 18 bp, synthetic construct
  misc_feature 1..18: note = Description of Artificial Sequence: Synthetic Antisense oligonucleotide
  modified_base 1: mod_base = OTHER; note = bicyclic nucleic acid (BNA)
  modified_base 3: mod_base = OTHER; note = bicyclic nucleic acid (BNA)
  modified_base 6: mod_base = OTHER; note = bicyclic nucleic acid (BNA)
  modified_base 18: mod_base = OTHER; note = bicyclic nucleic acid (BNA)
  source 1..18: mol_type = other DNA
ctgtccaagcccggttga

SEQ ID NO: 13515 - DNA, 18 bp, synthetic construct
  misc_feature 1..18: note = Description of Artificial Sequence: Synthetic Antisense oligonucleotide
  modified_base 1: mod_base = OTHER; note = bicyclic nucleic acid (BNA)
  modified_base 6: mod_base = OTHER; note = bicyclic nucleic acid (BNA)
  modified_base 9: mod_base = OTHER; note = bicyclic nucleic acid (BNA)
  modified_base 18: mod_base = OTHER; note = bicyclic nucleic acid (BNA)
  source 1..18: mol_type = other DNA
ctgtccaagcccggttga

SEQ ID NO: 13516 - DNA, 18 bp, synthetic construct
  misc_feature 1..18: note = Description of Artificial Sequence: Synthetic Antisense oligonucleotide
  modified_base 1: mod_base = OTHER; note = bicyclic nucleic acid (BNA)
  modified_base 5: mod_base = OTHER; note = bicyclic nucleic acid (BNA)
  modified_base 10: mod_base = OTHER; note = bicyclic nucleic acid (BNA)
  modified_base 18: mod_base = OTHER; note = bicyclic nucleic acid (BNA)
  source 1..18: mol_type = other DNA
ctgtccaagcccggttga

SEQ ID NO: 13517 - DNA, 18 bp, synthetic construct
  misc_feature 1..18: note = Description of Artificial Sequence: Synthetic Antisense oligonucleotide
  modified_base 1: mod_base = OTHER; note = bicyclic nucleic acid (BNA)
  modified_base 3: mod_base = OTHER; note = bicyclic nucleic acid (BNA)
  modified_base 10: mod_base = OTHER; note = bicyclic nucleic acid (BNA)
  modified_base 18: mod_base = OTHER; note = bicyclic nucleic acid (BNA)
  source 1..18: mol_type = other DNA
ctgtccaagcccggttga

SEQ ID NO: 13518 - DNA, 18 bp, synthetic construct
  misc_feature 1..18: note = Description of Artificial Sequence: Synthetic Antisense oligonucleotide
  modified_base 1: mod_base = OTHER; note = bicyclic nucleic acid (BNA)
  modified_base 13..14: mod_base = OTHER; note = bicyclic nucleic acid (BNA)
  modified_base 18: mod_base = OTHER; note = bicyclic nucleic acid (BNA)
  source 1..18: mol_type = other DNA
ctgtccaagcccggttga

SEQ ID NO: 13519 - DNA, 18 bp, synthetic construct
  misc_feature 1..18: note = Description of Artificial Sequence: Synthetic Antisense oligonucleotide
  modified_base 1: mod_base = OTHER; note = bicyclic nucleic acid (BNA)
  modified_base 6: mod_base = OTHER; note = bicyclic nucleic acid (BNA)
  modified_base 13: mod_base = OTHER; note = bicyclic nucleic acid (BNA)
  modified_base 18: mod_base = OTHER; note = bicyclic nucleic acid (BNA)
  source 1..18: mol_type = other DNA
ctgtccaagcccggttga

SEQ ID NO: 13520 - DNA, 18 bp, synthetic construct
  misc_feature 1..18: note = Description of Artificial Sequence: Synthetic Antisense oligonucleotide
  modified_base 1: mod_base = OTHER; note = bicyclic nucleic acid (BNA)
  modified_base 9: mod_base = OTHER; note = bicyclic nucleic acid (BNA)
  modified_base 11: mod_base = OTHER; note = bicyclic nucleic acid (BNA)
  modified_base 18: mod_base = OTHER; note = bicyclic nucleic acid (BNA)
  source 1..18: mol_type = other DNA
ctgtccaagcccggttga

SEQ ID NO: 13521 - DNA, 18 bp, synthetic construct
  misc_feature 1..18: note = Description of Artificial Sequence: Synthetic Antisense oligonucleotide
  modified_base 1: mod_base = OTHER; note = bicyclic nucleic acid (BNA)
  modified_base 14: mod_base = OTHER; note = bicyclic nucleic acid (BNA)
  modified_base 17..18: mod_base = OTHER; note = bicyclic nucleic acid (BNA)
  source 1..18: mol_type = other DNA
ctgtccaagcccggttga

SEQ ID NO: 13522 - DNA, 18 bp, synthetic construct
  misc_feature 1..18: note = Description of Artificial Sequence: Synthetic Antisense oligonucleotide
  modified_base 1: mod_base = OTHER; note = bicyclic nucleic acid (BNA)
  modified_base 11: mod_base = OTHER; note = bicyclic nucleic acid (BNA)
  modified_base 13: mod_base = OTHER; note = bicyclic nucleic acid (BNA)
  modified_base 18: mod_base = OTHER; note = bicyclic nucleic acid (BNA)
  source 1..18: mol_type = other DNA
ctgtccaagcccggttga

SEQ ID NO: 13523 - DNA, 18 bp, synthetic construct
  misc_feature 1..18: note = Description of Artificial Sequence: Synthetic Antisense oligonucleotide
  modified_base 1: mod_base = OTHER; note = bicyclic nucleic acid (BNA)
  modified_base 5: mod_base = OTHER; note = bicyclic nucleic acid (BNA)
  modified_base 14: mod_base = OTHER; note = bicyclic nucleic acid (BNA)
  modified_base 18: mod_base = OTHER; note = bicyclic nucleic acid (BNA)
  source 1..18: mol_type = other DNA
ctgtccaagcccggttga

SEQ ID NO: 13524 - DNA, 18 bp, synthetic construct
  misc_feature 1..18: note = Description of Artificial Sequence: Synthetic Antisense oligonucleotide
  modified_base 1: mod_base = OTHER; note = bicyclic nucleic acid (BNA)
  modified_base 3: mod_base = OTHER; note = bicyclic nucleic acid (BNA)
  modified_base 14: mod_base = OTHER; note = bicyclic nucleic acid (BNA)
  modified_base 18: mod_base = OTHER; note = bicyclic nucleic acid (BNA)
  source 1..18: mol_type = other DNA
ctgtccaagcccggttga

SEQ ID NO: 13525 - DNA, 18 bp, synthetic construct
  misc_feature 1..18: note = Description of Artificial Sequence: Synthetic Antisense oligonucleotide
  modified_base 1: mod_base = OTHER; note = bicyclic nucleic acid (BNA)
  modified_base 10: mod_base = OTHER; note = bicyclic nucleic acid (BNA)
  modified_base 12: mod_base = OTHER; note = bicyclic nucleic acid (BNA)
  modified_base 18: mod_base = OTHER; note = bicyclic nucleic acid (BNA)
  source 1..18: mol_type = other DNA
ctgtccaagcccggttga

SEQ ID NO: 13526 - DNA, 18 bp, synthetic construct
  misc_feature 1..18: note = Description of Artificial Sequence: Synthetic Antisense oligonucleotide
  modified_base 1: mod_base = OTHER; note = bicyclic nucleic acid (BNA)
  modified_base 9: mod_base = OTHER; note = bicyclic nucleic acid (BNA)
  modified_base 17..18: mod_base = OTHER; note = bicyclic nucleic acid (BNA)
  source 1..18: mol_type = other DNA
ctgtccaagcccggttga

SEQ ID NO: 13527 - DNA, 18 bp, synthetic construct
  misc_feature 1..18: note = Description of Artificial Sequence: Synthetic Antisense oligonucleotide
  modified_base 1: mod_base = OTHER; note = bicyclic nucleic acid (BNA)
  modified_base 12: mod_base = OTHER; note = bicyclic nucleic acid (BNA)
  modified_base 14: mod_base = OTHER; note = bicyclic nucleic acid (BNA)
  modified_base 18: mod_base = OTHER; note = bicyclic nucleic acid (BNA)
  source 1..18: mol_type = other DNA
ctgtccaagcccggttga

SEQ ID NO: 13528 - DNA, 18 bp, synthetic construct
  misc_feature 1..18: note = Description of Artificial Sequence: Synthetic Antisense oligonucleotide
  modified_base 1: mod_base = OTHER; note = bicyclic nucleic acid (BNA)
  modified_base 5: mod_base = OTHER; note = bicyclic nucleic acid (BNA)
  modified_base 11: mod_base = OTHER; note = bicyclic nucleic acid (BNA)
  modified_base 18: mod_base = OTHER; note = bicyclic nucleic acid (BNA)
  source 1..18: mol_type = other DNA
ctgtccaagcccggttga

SEQ ID NO: 13529 - DNA, 18 bp, synthetic construct
  misc_feature 1..18: note = Description of Artificial Sequence: Synthetic Antisense oligonucleotide
  modified_base 1: mod_base = OTHER; note = bicyclic nucleic acid (BNA)
  modified_base 3: mod_base = OTHER; note = bicyclic nucleic acid (BNA)
  modified_base 17..18: mod_base = OTHER; note = bicyclic nucleic acid (BNA)
  source 1..18: mol_type = other DNA
ctgtccaagcccggttga

SEQ ID NO: 13530 - DNA, 18 bp, synthetic construct
  misc_feature 1..18: note = Description of Artificial Sequence: Synthetic Antisense oligonucleotide
  modified_base 1: mod_base = OTHER; note = bicyclic nucleic acid (BNA)
  modified_base 6: mod_base = OTHER; note = bicyclic nucleic acid (BNA)
  modified_base 12: mod_base = OTHER; note = bicyclic nucleic acid (BNA)
  modified_base 18: mod_base = OTHER; note = bicyclic nucleic acid (BNA)
  source 1..18: mol_type = other DNA
ctgtccaagcccggttga

SEQ ID NO: 13531 - DNA, 18 bp, synthetic construct
  misc_feature 1..18: note = Description of Artificial Sequence: Synthetic Antisense oligonucleotide
  modified_base 1: mod_base = OTHER; note = bicyclic nucleic acid (BNA)
  modified_base 5..6: mod_base = OTHER; note = bicyclic nucleic acid (BNA)
  modified_base 18: mod_base = OTHER; note = bicyclic nucleic acid (BNA)
  source 1..18: mol_type = other DNA
ctgtccaagcccggttga

SEQ ID NO: 13532 - DNA, 18 bp, synthetic construct
  misc_feature 1..18: note = Description of Artificial Sequence: Synthetic Antisense oligonucleotide
  modified_base 1: mod_base = OTHER; note = bicyclic nucleic acid (BNA)
  modified_base 11: mod_base = OTHER; note = bicyclic nucleic acid (BNA)
  modified_base 14: mod_base = OTHER; note = bicyclic nucleic acid (BNA)
  modified_base 18: mod_base = OTHER; note = bicyclic nucleic acid (BNA)
  source 1..18: mol_type = other DNA
ctgtccaagcccggttga

SEQ ID NO: 13533 - DNA, 18 bp, synthetic construct
  misc_feature 1..18: note = Description of Artificial Sequence: Synthetic Antisense oligonucleotide
  modified_base 1: mod_base = OTHER; note = bicyclic nucleic acid (BNA)
  modified_base 9: mod_base = OTHER; note = bicyclic nucleic acid (BNA)
  modified_base 12: mod_base = OTHER; note = bicyclic nucleic acid (BNA)
  modified_base 18: mod_base = OTHER; note = bicyclic nucleic acid (BNA)
  source 1..18: mol_type = other DNA
ctgtccaagcccggttga

SEQ ID NO: 13534 - DNA, 18 bp, synthetic construct
  misc_feature 1..18: note = Description of Artificial Sequence: Synthetic Antisense oligonucleotide
  modified_base 1: mod_base = OTHER; note = bicyclic nucleic acid (BNA)
  modified_base 5: mod_base = OTHER; note = bicyclic nucleic acid (BNA)
  modified_base 17..18: mod_base = OTHER; note = bicyclic nucleic acid (BNA)
  source 1..18: mol_type = other DNA
ctgtccaagcccggttga

SEQ ID NO: 13535 - DNA, 18 bp, synthetic construct
  misc_feature 1..18: note = Description of Artificial Sequence: Synthetic Antisense oligonucleotide
  modified_base 1: mod_base = OTHER; note = bicyclic nucleic acid (BNA)
  modified_base 3: mod_base = OTHER; note = bicyclic nucleic acid (BNA)
  modified_base 11: mod_base = OTHER; note = bicyclic nucleic acid (BNA)
  modified_base 18: mod_base = OTHER; note = bicyclic nucleic acid (BNA)
  source 1..18: mol_type = other DNA
ctgtccaagcccggttga

SEQ ID NO: 13536 - DNA, 18 bp, synthetic construct
  misc_feature 1..18: note = Description of Artificial Sequence: Synthetic Antisense oligonucleotide
  modified_base 1: mod_base = OTHER; note = bicyclic nucleic acid (BNA)
  modified_base 10..11: mod_base = OTHER; note = bicyclic nucleic acid (BNA)
  modified_base 18: mod_base = OTHER; note = bicyclic nucleic acid (BNA)
  source 1..18: mol_type = other DNA
ctgtccaagcccggttga

SEQ ID NO: 13537 - DNA, 18 bp, synthetic construct
  misc_feature 1..18: note = Description of Artificial Sequence: Synthetic Antisense oligonucleotide
  modified_base 1: mod_base = OTHER; note = bicyclic nucleic acid (BNA)
  modified_base 10: mod_base = OTHER; note = bicyclic nucleic acid (BNA)
  modified_base 17..18: mod_base = OTHER; note = bicyclic nucleic acid (BNA)
  source 1..18: mol_type = other DNA
ctgtccaagcccggttga

SEQ ID NO: 13538 - DNA, 18 bp, synthetic construct
  misc_feature 1..18: note = Description of Artificial Sequence: Synthetic Antisense oligonucleotide
  modified_base 1: mod_base = OTHER; note = bicyclic nucleic acid (BNA)
  modified_base 12..13: mod_base = OTHER; note = bicyclic nucleic acid (BNA)
  modified_base 18: mod_base = OTHER; note = bicyclic nucleic acid (BNA)
  source 1..18: mol_type = other DNA
ctgtccaagcccggttga

SEQ ID NO: 13539 - DNA, 18 bp, synthetic construct
  misc_feature 1..18: note = Description of Artificial Sequence: Synthetic Antisense oligonucleotide
  modified_base 1: mod_base = OTHER; note = bicyclic nucleic acid (BNA)
  modified_base 5: mod_base = OTHER; note = bicyclic nucleic acid (BNA)
  modified_base 12: mod_base = OTHER; note = bicyclic nucleic acid (BNA)
  modified_base 18: mod_base = OTHER; note = bicyclic nucleic acid (BNA)
  source 1..18: mol_type = other DNA
ctgtccaagcccggttga

SEQ ID NO: 13540 - DNA, 18 bp, synthetic construct
  misc_feature 1..18: note = Description of Artificial Sequence: Synthetic Antisense oligonucleotide
  modified_base 1: mod_base = OTHER; note = bicyclic nucleic acid (BNA)
  modified_base 10: mod_base = OTHER; note = bicyclic nucleic acid (BNA)
  modified_base 14: mod_base = OTHER; note = bicyclic nucleic acid (BNA)
  modified_base 18: mod_base = OTHER; note = bicyclic nucleic acid (BNA)
  source 1..18: mol_type = other DNA
ctgtccaagcccggttga

SEQ ID NO: 13541 - DNA, 18 bp, synthetic construct
  misc_feature 1..18: note = Description of Artificial Sequence: Synthetic Antisense oligonucleotide
  modified_base 1: mod_base = OTHER; note = bicyclic nucleic acid (BNA)
  modified_base 6: mod_base = OTHER; note = bicyclic nucleic acid (BNA)
  modified_base 11: mod_base = OTHER; note = bicyclic nucleic acid (BNA)
  modified_base 18: mod_base = OTHER; note = bicyclic nucleic acid (BNA)
  source 1..18: mol_type = other DNA
ctgtccaagcccggttga

SEQ ID NO: 13542 - DNA, 18 bp, synthetic construct
  misc_feature 1..18: note = Description of Artificial Sequence: Synthetic Antisense oligonucleotide
  modified_base 1: mod_base = OTHER; note = bicyclic nucleic acid (BNA)
  modified_base 6: mod_base = OTHER; note = bicyclic nucleic acid (BNA)
  modified_base 17..18: mod_base = OTHER; note = bicyclic nucleic acid (BNA)
  source 1..18: mol_type = other DNA
ctgtccaagcccggttga

SEQ ID NO: 13543 - DNA, 18 bp, synthetic construct
  misc_feature 1..18: note = Description of Artificial Sequence: Synthetic Antisense oligonucleotide
  modified_base 1: mod_base = OTHER; note = bicyclic nucleic acid (BNA)
  modified_base 9: mod_base = OTHER; note = bicyclic nucleic acid (BNA)
  modified_base 13: mod_base = OTHER; note = bicyclic nucleic acid (BNA)
  modified_base 18: mod_base = OTHER; note = bicyclic nucleic acid (BNA)
  source 1..18: mol_type = other DNA
ctgtccaagcccggttga

SEQ ID NO: 13544 - DNA, 18 bp, synthetic construct
  misc_feature 1..18: note = Description of Artificial Sequence: Synthetic Antisense oligonucleotide
  modified_base 1: mod_base = OTHER; note = bicyclic nucleic acid (BNA)
  modified_base 11: mod_base = OTHER; note = bicyclic nucleic acid (BNA)
  modified_base 17..18: mod_base = OTHER; note = bicyclic nucleic acid (BNA)
  source 1..18: mol_type = other DNA
ctgtccaagcccggttga

SEQ ID NO: 13545 - DNA, 18 bp, synthetic construct
  misc_feature 1..18: note = Description of Artificial Sequence: Synthetic Antisense oligonucleotide
  modified_base 1: mod_base = OTHER; note = bicyclic nucleic acid (BNA)
  modified_base 3: mod_base = OTHER; note = bicyclic nucleic acid (BNA)
  modified_base 12: mod_base = OTHER; note = bicyclic nucleic acid (BNA)
  modified_base 18: mod_base = OTHER; note = bicyclic nucleic acid (BNA)
  source 1..18: mol_type = other DNA
ctgtccaagcccggttga

SEQ ID NO: 13546 - DNA, 18 bp, synthetic construct
  misc_feature 1..18: note = Description of Artificial Sequence: Synthetic Antisense oligonucleotide
  modified_base 1: mod_base = OTHER; note = bicyclic nucleic acid (BNA)
  modified_base 3: mod_base = OTHER; note = bicyclic nucleic acid (BNA)
  modified_base 5: mod_base = OTHER; note = bicyclic nucleic acid (BNA)
  modified_base 18: mod_base = OTHER; note = bicyclic nucleic acid (BNA)
  source 1..18: mol_type = other DNA
ctgtccaagcccggttga

SEQ ID NO: 13547 - DNA, 18 bp, synthetic construct
  misc_feature 1..18: note = Description of Artificial Sequence: Synthetic Antisense oligonucleotide
  modified_base 1: mod_base = OTHER; note = bicyclic nucleic acid (BNA)
  modified_base 10: mod_base = OTHER; note = bicyclic nucleic acid (BNA)
  modified_base 13: mod_base = OTHER; note = bicyclic nucleic acid (BNA)
  modified_base 18: mod_base = OTHER; note = bicyclic nucleic acid (BNA)
  source 1..18: mol_type = other DNA
ctgtccaagcccggttga

SEQ ID NO: 13548 - DNA, 20 bp, synthetic construct
  misc_feature 1..20: note = Description of Artificial Sequence: Synthetic Antisense oligonucleotide
  modified_base 1..2: mod_base = OTHER; note = bicyclic nucleic acid (BNA)
  modified_base 20: mod_base = OTHER; note = bicyclic nucleic acid (BNA)
  source 1..20: mol_type = other DNA
tcaaggaagatggcatttct

SEQ ID NO: 13549 - DNA, 20 bp, synthetic construct
  misc_feature 1..20: note = Description of Artificial Sequence: Synthetic Antisense oligonucleotide
  modified_base 1: mod_base = OTHER; note = bicyclic nucleic acid (BNA)
  modified_base 9: mod_base = OTHER; note = bicyclic nucleic acid (BNA)
  modified_base 20: mod_base = OTHER; note = bicyclic nucleic acid (BNA)
  source 1..20: mol_type = other DNA
tcaaggaagatggcatttct

SEQ ID NO: 13550 - DNA, 20 bp, synthetic construct
  misc_feature 1..20: note = Description of Artificial Sequence: Synthetic Antisense oligonucleotide
  modified_base 1: mod_base = OTHER; note = bicyclic nucleic acid (BNA)
  modified_base 5: mod_base = OTHER; note = bicyclic nucleic acid (BNA)
  modified_base 20: mod_base = OTHER; note = bicyclic nucleic acid (BNA)
  source 1..20: mol_type = other DNA
tcaaggaagatggcatttct

SEQ ID NO: 13551 - DNA, 20 bp, synthetic construct
  misc_feature 1..20: note = Description of Artificial Sequence: Synthetic Antisense oligonucleotide
  modified_base 1: mod_base = OTHER; note = bicyclic nucleic acid (BNA)
  modified_base 6: mod_base = OTHER; note = bicyclic nucleic acid (BNA)
  modified_base 20: mod_base = OTHER; note = bicyclic nucleic acid (BNA)
  source 1..20: mol_type = other DNA
tcaaggaagatggcatttct

SEQ ID NO: 13552 - DNA, 20 bp, synthetic construct
  misc_feature 1..20: note = Description of Artificial Sequence: Synthetic Antisense oligonucleotide
  modified_base 1: mod_base = OTHER; note = bicyclic nucleic acid (BNA)
  modified_base 12: mod_base = OTHER; note = bicyclic nucleic acid (BNA)
  modified_base 20: mod_base = OTHER; note = bicyclic nucleic acid (BNA)
  source 1..20: mol_type = other DNA
tcaaggaagatggcatttct

SEQ ID NO: 13553 - DNA, 20 bp, synthetic construct
  misc_feature 1..20: note = Description of Artificial Sequence: Synthetic Antisense oligonucleotide
  modified_base 1: mod_base = OTHER; note = bicyclic nucleic acid (BNA)
  modified_base 13: mod_base = OTHER; note = bicyclic nucleic acid (BNA)
  modified_base 20: mod_base = OTHER; note = bicyclic nucleic acid (BNA)
  source 1..20: mol_type = other DNA
tcaaggaagatggcatttct

SEQ ID NO: 13554 - DNA, 20 bp, synthetic construct
  misc_feature 1..20: note = Description of Artificial Sequence: Synthetic Antisense oligonucleotide
  modified_base 1: mod_base = OTHER; note = bicyclic nucleic acid (BNA)
  modified_base 19..20: mod_base = OTHER; note = bicyclic nucleic acid (BNA)
  source 1..20: mol_type = other DNA
tcaaggaagatggcatttct

SEQ ID NO: 13555 - DNA, 20 bp, synthetic construct
  misc_feature 1..20: note = Description of Artificial Sequence: Synthetic Antisense oligonucleotide
  modified_base 1: mod_base = OTHER; note = bicyclic nucleic acid (BNA)
  modified_base 14: mod_base = OTHER; note = bicyclic nucleic acid (BNA)
  modified_base 20: mod_base = OTHER; note = bicyclic nucleic acid (BNA)
  source 1..20: mol_type = other DNA
tcaaggaagatggcatttct

SEQ ID NO: 13556 - DNA, 22 bp, synthetic construct
  misc_feature 1..22: note = Description of Artificial Sequence: Synthetic Antisense oligonucleotide
  modified_base 1..2: mod_base = OTHER; note = bicyclic nucleic acid (BNA)
  modified_base 22: mod_base = OTHER; note = bicyclic nucleic acid (BNA)
  source 1..22: mol_type = other DNA
tcaaggaagatggcatttctag

SEQ ID NO: 13557 - DNA, 22 bp, synthetic construct
  misc_feature 1..22: note = Description of Artificial Sequence: Synthetic Antisense oligonucleotide
  modified_base 1: mod_base = OTHER; note = bicyclic nucleic acid (BNA)
  modified_base 9: mod_base = OTHER; note = bicyclic nucleic acid (BNA)
  modified_base 22: mod_base = OTHER; note = bicyclic nucleic acid (BNA)
  source 1..22: mol_type = other DNA
tcaaggaagatggcatttctag

SEQ ID NO: 13558 - DNA, 22 bp, synthetic construct
  misc_feature 1..22: note = Description of Artificial Sequence: Synthetic Antisense oligonucleotide
  modified_base 1: mod_base = OTHER; note = bicyclic nucleic acid (BNA)
  modified_base 5: mod_base = OTHER; note = bicyclic nucleic acid (BNA)
  modified_base 22: mod_base = OTHER; note = bicyclic nucleic acid (BNA)
  source 1..22: mol_type = other DNA
tcaaggaagatggcatttctag

SEQ ID NO: 13559 - DNA, 22 bp, synthetic construct
  misc_feature 1..22: note = Description of Artificial Sequence: Synthetic Antisense oligonucleotide
  modified_base 1: mod_base = OTHER; note = bicyclic nucleic acid (BNA)
  modified_base 6: mod_base = OTHER; note = bicyclic nucleic acid (BNA)
  modified_base 22: mod_base = OTHER; note = bicyclic nucleic acid (BNA)
  source 1..22: mol_type = other DNA
tcaaggaagatggcatttctag

SEQ ID NO: 13560 - DNA, 22 bp, synthetic construct
  misc_feature 1..22: note = Description of Artificial Sequence: Synthetic Antisense oligonucleotide
  modified_base 1: mod_base = OTHER; note = bicyclic nucleic acid (BNA)
  modified_base 12: mod_base = OTHER; note = bicyclic nucleic acid (BNA)
  modified_base 22: mod_base = OTHER; note = bicyclic nucleic acid (BNA)
  source 1..22: mol_type = other DNA
tcaaggaagatggcatttctag

SEQ ID NO: 13561 - DNA, 22 bp, synthetic construct
  misc_feature 1..22: note = Description of Artificial Sequence: Synthetic Antisense oligonucleotide
  modified_base 1: mod_base = OTHER; note = bicyclic nucleic acid (BNA)
  modified_base 13: mod_base = OTHER; note = bicyclic nucleic acid (BNA)
  modified_base 22: mod_base = OTHER; note = bicyclic nucleic acid (BNA)
  source 1..22: mol_type = other DNA
tcaaggaagatggcatttctag

SEQ ID NO: 13562 - DNA, 22 bp, synthetic construct
  misc_feature 1..22: note = Description of Artificial Sequence: Synthetic Antisense oligonucleotide
  modified_base 1: mod_base = OTHER; note = bicyclic nucleic acid (BNA)
  modified_base 19: mod_base = OTHER; note = bicyclic nucleic acid (BNA)
  modified_base 22: mod_base = OTHER; note = bicyclic nucleic acid (BNA)
  source 1..22: mol_type = other DNA
tcaaggaagatggcatttctag

SEQ ID NO: 13563 - DNA, 22 bp, synthetic construct
  misc_feature 1..22: note = Description of Artificial Sequence: Synthetic Antisense oligonucleotide
  modified_base 1: mod_base = OTHER; note = bicyclic nucleic acid (BNA)
  modified_base 14: mod_base = OTHER; note = bicyclic nucleic acid (BNA)
  modified_base 22: mod_base = OTHER; note = bicyclic nucleic acid (BNA)
  source 1..22: mol_type = other DNA
tcaaggaagatggcatttctag

SEQ ID NO: 13564 - DNA, 20 bp, synthetic construct
  misc_feature 1..20: note = Description of Artificial Sequence: Synthetic Antisense oligonucleotide
  modified_base 1: mod_base = OTHER; note = bicyclic nucleic acid (BNA)
  modified_base 9: mod_base = OTHER; note = bicyclic nucleic acid (BNA)
  modified_base 14: mod_base = OTHER; note = bicyclic nucleic acid (BNA)
  modified_base 20: mod_base = OTHER; note = bicyclic nucleic acid (BNA)
  source 1..20: mol_type = other DNA
tcaaggaagatggcatttct

SEQ ID NO: 13565 - DNA, 20 bp, synthetic construct
  misc_feature 1..20: note = Description of Artificial Sequence: Synthetic Antisense oligonucleotide
  modified_base 1: mod_base = OTHER; note = bicyclic nucleic acid (BNA)
  modified_base 5: mod_base = OTHER; note = bicyclic nucleic acid (BNA)
  modified_base 9: mod_base = OTHER; note = bicyclic nucleic acid (BNA)
  modified_base 20: mod_base = OTHER; note = bicyclic nucleic acid (BNA)
  source 1..20: mol_type = other DNA
tcaaggaagatggcatttct

SEQ ID NO: 13566 - DNA, 20 bp, synthetic construct
  misc_feature 1..20: note = Description of Artificial Sequence: Synthetic Antisense oligonucleotide
  modified_base 1: mod_base = OTHER; note = bicyclic nucleic acid (BNA)
  modified_base 5: mod_base = OTHER; note = bicyclic nucleic acid (BNA)
  modified_base 19..20: mod_base = OTHER; note = bicyclic nucleic acid (BNA)
  source 1..20: mol_type = other DNA
tcaaggaagatggcatttct

SEQ ID NO: 13567 - DNA, 20 bp, synthetic construct
  misc_feature 1..20: note = Description of Artificial Sequence: Synthetic Antisense oligonucleotide
  modified_base 1: mod_base = OTHER; note = bicyclic nucleic acid (BNA)
  modified_base 6: mod_base = OTHER; note = bicyclic nucleic acid (BNA)
  modified_base 14: mod_base = OTHER; note = bicyclic nucleic acid (BNA)
  modified_base 20: mod_base = OTHER; note = bicyclic nucleic acid (BNA)
  source 1..20: mol_type = other DNA
tcaaggaagatggcatttct

SEQ ID NO: 13568 - DNA, 20 bp, synthetic construct
  misc_feature 1..20: note = Description of Artificial Sequence: Synthetic Antisense oligonucleotide
  modified_base 1: mod_base = OTHER; note = bicyclic nucleic acid (BNA)
  modified_base 5: mod_base = OTHER; note = bicyclic nucleic acid (BNA)
  modified_base 13: mod_base = OTHER; note = bicyclic nucleic acid (BNA)
  modified_base 20: mod_base = OTHER; note = bicyclic nucleic acid (BNA)
  source 1..20: mol_type = other DNA
tcaaggaagatggcatttct

SEQ ID NO: 13569 - DNA, 20 bp, synthetic construct
  misc_feature 1..20: note = Description of Artificial Sequence: Synthetic Antisense oligonucleotide
  modified_base 1..2: mod_base = OTHER; note = bicyclic nucleic acid (BNA)
  modified_base 12: mod_base = OTHER; note = bicyclic nucleic acid (BNA)
  modified_base 20: mod_base = OTHER; note = bicyclic nucleic acid (BNA)
  source 1..20: mol_type = other DNA
tcaaggaagatggcatttct

SEQ ID NO: 13570 - DNA, 20 bp, synthetic construct
  misc_feature 1..20: note = Description of Artificial Sequence: Synthetic Antisense oligonucleotide
  modified_base 1: mod_base = OTHER; note = bicyclic nucleic acid (BNA)
  modified_base 6: mod_base = OTHER; note = bicyclic nucleic acid (BNA)
  modified_base 9: mod_base = OTHER; note = bicyclic nucleic acid (BNA)
  modified_base 20: mod_base = OTHER; note = bicyclic nucleic acid (BNA)
  source 1..20: mol_type = other DNA
tcaaggaagatggcatttct

SEQ ID NO: 13571 - DNA, 20 bp, synthetic construct
  misc_feature 1..20: note = Description of Artificial Sequence: Synthetic Antisense oligonucleotide
  modified_base 1: mod_base = OTHER; note = bicyclic nucleic acid (BNA)
  modified_base 13..14: mod_base = OTHER; note = bicyclic nucleic acid (BNA)
  modified_base 20: mod_base = OTHER; note = bicyclic nucleic acid (BNA)
  source 1..20: mol_type = other DNA
tcaaggaagatggcatttct

SEQ ID NO: 13572 - DNA, 20 bp, synthetic construct
  misc_feature 1..20: note = Description of Artificial Sequence: Synthetic Antisense oligonucleotide
  modified_base 1: mod_base = OTHER; note = bicyclic nucleic acid (BNA)
  modified_base 6: mod_base = OTHER; note = bicyclic nucleic acid (BNA)
  modified_base 13: mod_base = OTHER; note = bicyclic nucleic acid (BNA)
  modified_base 20: mod_base = OTHER; note = bicyclic nucleic acid (BNA)
  source 1..20: mol_type = other DNA
tcaaggaagatggcatttct

SEQ ID NO: 13573 - DNA, 20 bp, synthetic construct
  misc_feature 1..20: note = Description of Artificial Sequence: Synthetic Antisense oligonucleotide
  modified_base 1: mod_base = OTHER; note = bicyclic nucleic acid (BNA)
  modified_base 6: mod_base = OTHER; note = bicyclic nucleic acid (BNA)
  modified_base 19..20: mod_base = OTHER; note = bicyclic nucleic acid (BNA)
  source 1..20: mol_type = other DNA
tcaaggaagatggcatttct

SEQ ID NO: 13574 - DNA, 20 bp, synthetic construct
  misc_feature 1..20: note = Description of Artificial Sequence: Synthetic Antisense oligonucleotide
  modified_base 1: mod_base = OTHER; note = bicyclic nucleic acid (BNA)
  modified_base 5: mod_base = OTHER; note = bicyclic nucleic acid (BNA)
  modified_base 14: mod_base = OTHER; note = bicyclic nucleic acid (BNA)
  modified_base 20: mod_base = OTHER; note = bicyclic nucleic acid (BNA)
  source 1..20: mol_type = other DNA
tcaaggaagatggcatttct

SEQ ID NO: 13575 - DNA, 20 bp, synthetic construct
  misc_feature 1..20: note = Description of Artificial Sequence: Synthetic Antisense oligonucleotide
  modified_base 1..2: mod_base = OTHER; note = bicyclic nucleic acid (BNA)
  modified_base 6: mod_base = OTHER; note = bicyclic nucleic acid (BNA)
  modified_base 20: mod_base = OTHER; note = bicyclic nucleic acid (BNA)
  source 1..20: mol_type = other DNA
tcaaggaagatggcatttct

SEQ ID NO: 13576 - DNA, 20 bp, synthetic construct
  misc_feature 1..20: note = Description of Artificial Sequence: Synthetic Antisense oligonucleotide
  modified_base 1: mod_base = OTHER; note = bicyclic nucleic acid (BNA)
  modified_base 12: mod_base = OTHER; note = bicyclic nucleic acid (BNA)
  modified_base 19..20: mod_base = OTHER; note = bicyclic nucleic acid (BNA)
  source 1..20: mol_type = other DNA
tcaaggaagatggcatttct

SEQ ID NO: 13577 - DNA, 20 bp, synthetic construct
  misc_feature 1..20: note = Description of Artificial Sequence: Synthetic Antisense oligonucleotide
  modified_base 1: mod_base = OTHER; note = bicyclic nucleic acid (BNA)
  modified_base 12: mod_base = OTHER; note = bicyclic nucleic acid (BNA)
  modified_base 14: mod_base = OTHER; note = bicyclic nucleic acid (BNA)
  modified_base 20: mod_base = OTHER; note = bicyclic nucleic acid (BNA)
  source 1..20: mol_type = other DNA
tcaaggaagatggcatttct

SEQ ID NO: 13578 - DNA, 20 bp, synthetic construct
  misc_feature 1..20: note = Description of Artificial Sequence: Synthetic Antisense oligonucleotide
  modified_base 1: mod_base = OTHER; note = bicyclic nucleic acid (BNA)
  modified_base 6: mod_base = OTHER; note = bicyclic nucleic acid (BNA)
  modified_base 12: mod_base = OTHER; note = bicyclic nucleic acid (BNA)
  modified_base 20: mod_base = OTHER; note = bicyclic nucleic acid (BNA)
  source 1..20: mol_type = other DNA
tcaaggaagatggcatttct

SEQ ID NO: 13579 - DNA, 20 bp, synthetic construct
  misc_feature 1..20: note = Description of Artificial Sequence: Synthetic Antisense oligonucleotide
  modified_base 1: mod_base = OTHER; note = bicyclic nucleic acid (BNA)
  modified_base 5..6: mod_base = OTHER; note = bicyclic nucleic acid (BNA)
  modified_base 20: mod_base = OTHER; note = bicyclic nucleic acid (BNA)
  source 1..20: mol_type = other DNA
tcaaggaagatggcatttct

SEQ ID NO: 13580 - DNA, 20 bp, synthetic construct
  misc_feature 1..20: note = Description of Artificial Sequence: Synthetic Antisense oligonucleotide
  modified_base 1..2: mod_base = OTHER; note = bicyclic nucleic acid (BNA)
  modified_base 14: mod_base = OTHER; note = bicyclic nucleic acid (BNA)
  modified_base 20: mod_base = OTHER; note = bicyclic nucleic acid (BNA)
  source 1..20: mol_type = other DNA
tcaaggaagatggcatttct

SEQ ID NO: 13581 - DNA, 20 bp, synthetic construct
  misc_feature 1..20: note = Description of Artificial Sequence: Synthetic Antisense oligonucleotide
  modified_base 1: mod_base = OTHER; note = bicyclic nucleic acid (BNA)
  modified_base 9: mod_base = OTHER; note = bicyclic nucleic acid (BNA)
  modified_base 12: mod_base = OTHER; note = bicyclic nucleic acid (BNA)
  modified_base 20: mod_base = OTHER; note = bicyclic nucleic acid (BNA)
  source 1..20: mol_type = other DNA
tcaaggaagatggcatttct

SEQ ID NO: 13582 - DNA, 20 bp, synthetic construct
  misc_feature 1..20: note = Description of Artificial Sequence: Synthetic Antisense oligonucleotide
  modified_base 1..2: mod_base = OTHER; note = bicyclic nucleic acid (BNA)
  modified_base 5: mod_base = OTHER; note = bicyclic nucleic acid (BNA)
  modified_base 20: mod_base = OTHER; note = bicyclic nucleic acid (BNA)
  source 1..20: mol_type = other DNA
tcaaggaagatggcatttct

SEQ ID NO: 13583 - DNA, 20 bp, synthetic construct
  misc_feature 1..20: note = Description of Artificial Sequence: Synthetic Antisense oligonucleotide
  modified_base 1: mod_base = OTHER; note = bicyclic nucleic acid (BNA)
  modified_base 13: mod_base = OTHER; note = bicyclic nucleic acid (BNA)
  modified_base 19..20: mod_base = OTHER; note = bicyclic nucleic acid (BNA)
  source 1..20: mol_type = other DNA
tcaaggaagatggcatttct

SEQ ID NO: 13584 - DNA, 20 bp, synthetic construct
  misc_feature 1..20: note = Description of Artificial Sequence: Synthetic Antisense oligonucleotide
  modified_base 1: mod_base = OTHER; note = bicyclic nucleic acid (BNA)
  modified_base 12..13: mod_base = OTHER; note = bicyclic nucleic acid (BNA)
  modified_base 20: mod_base = OTHER; note = bicyclic nucleic acid (BNA)
  source 1..20: mol_type = other DNA
tcaaggaagatggcatttct

SEQ ID NO: 13585 - DNA, 20 bp, synthetic construct
  misc_feature 1..20: note = Description of Artificial Sequence: Synthetic Antisense oligonucleotide
  modified_base 1: mod_base = OTHER; note = bicyclic nucleic acid (BNA)
  modified_base 5: mod_base = OTHER; note = bicyclic nucleic acid (BNA)
  modified_base 12: mod_base = OTHER; note = bicyclic nucleic acid (BNA)
  modified_base 20: mod_base = OTHER; note = bicyclic nucleic acid (BNA)
  source 1..20: mol_type = other DNA
tcaaggaagatggcatttct

SEQ ID NO: 13586 - DNA, 20 bp, synthetic construct
  misc_feature 1..20: note = Description of Artificial Sequence: Synthetic Antisense oligonucleotide
  modified_base 1..2: mod_base = OTHER; note = bicyclic nucleic acid (BNA)
  modified_base 13: mod_base = OTHER; note = bicyclic nucleic acid (BNA)
  modified_base 20: mod_base = OTHER; note = bicyclic nucleic acid (BNA)
  source 1..20: mol_type = other DNA
tcaaggaagatggcatttct

SEQ ID NO: 13587 - DNA, 20 bp, synthetic construct
  misc_feature 1..20: note = Description of Artificial Sequence: Synthetic Antisense oligonucleotide
  modified_base 1: mod_base = OTHER; note = bicyclic nucleic acid (BNA)
  modified_base 9: mod_base = OTHER; note = bicyclic nucleic acid (BNA)
  modified_base 13: mod_base = OTHER; note = bicyclic nucleic acid (BNA)
  modified_base 20: mod_base = OTHER; note = bicyclic nucleic acid (BNA)
  source 1..20: mol_type = other DNA
tcaaggaagatggcatttct

SEQ ID NO: 13588 - DNA, 20 bp, synthetic construct
  misc_feature 1..20: note = Description of Artificial Sequence: Synthetic Antisense oligonucleotide
  modified_base 1..2: mod_base = OTHER; note = bicyclic nucleic acid (BNA)
  modified_base 19..20: mod_base = OTHER; note = bicyclic nucleic acid (BNA)
  source 1..20: mol_type = other DNA
tcaaggaagatggcatttct

SEQ ID NO: 13589 - DNA, 20 bp, synthetic construct
  misc_feature 1..20: note = Description of Artificial Sequence: Synthetic Antisense oligonucleotide
  modified_base 1..2: mod_base = OTHER; note = bicyclic nucleic acid (BNA)
  modified_base 9: mod_base = OTHER; note = bicyclic nucleic acid (BNA)
  modified_base 20: mod_base = OTHER; note = bicyclic nucleic acid (BNA)
  source 1..20: mol_type = other DNA
tcaaggaagatggcatttct

SEQ ID NO: 13590 - DNA, 20 bp, synthetic construct
  misc_feature 1..20: note = Description of Artificial Sequence: Synthetic Antisense oligonucleotide
  modified_base 1: mod_base = OTHER; note = bicyclic nucleic acid (BNA)
  modified_base 14: mod_base = OTHER; note = bicyclic nucleic acid (BNA)
  modified_base 19..20: mod_base = OTHER; note = bicyclic nucleic acid (BNA)
  source 1..20: mol_type = other DNA
tcaaggaagatggcatttct

SEQ ID NO: 13591 - DNA, 20 bp, synthetic construct
  misc_feature 1..20: note = Description of Artificial Sequence: Synthetic Antisense oligonucleotide
  modified_base 1: mod_base = OTHER; note = bicyclic nucleic acid (BNA)
  modified_base 9: mod_base = OTHER; note = bicyclic nucleic acid (BNA)
  modified_base 19..20: mod_base = OTHER; note = bicyclic nucleic acid (BNA)
  source 1..20: mol_type = other DNA
tcaaggaagatggcatttct

SEQ ID NO: 13592 - DNA, 22 bp, synthetic construct
  misc_feature 1..22: note = Description of Artificial Sequence: Synthetic Antisense oligonucleotide
  modified_base 1: mod_base = OTHER; note = bicyclic nucleic acid (BNA)
  modified_base 9: mod_base = OTHER; note = bicyclic nucleic acid (BNA)
  modified_base 14: mod_base = OTHER; note = bicyclic nucleic acid (BNA)
  modified_base 22: mod_base = OTHER; note = bicyclic nucleic acid (BNA)
  source 1..22: mol_type = other DNA
tcaaggaagatggcatttctag

SEQ ID NO: 13593 - DNA, 22 bp, synthetic construct
  misc_feature 1..22: note = Description of Artificial Sequence: Synthetic Antisense oligonucleotide
  modified_base 1: mod_base = OTHER; note = bicyclic nucleic acid (BNA)
  modified_base 5: mod_base = OTHER; note = bicyclic nucleic acid (BNA)
  modified_base 9: mod_base = OTHER; note = bicyclic nucleic acid (BNA)
  modified_base 22: mod_base = OTHER; note = bicyclic nucleic acid (BNA)
  source 1..22: mol_type = other DNA
tcaaggaagatggcatttctag

SEQ ID NO: 13594 - DNA, 22 bp, synthetic construct
  misc_feature 1..22: note = Description of Artificial Sequence: Synthetic Antisense oligonucleotide
  modified_base 1: mod_base = OTHER; note = bicyclic nucleic acid (BNA)
  modified_base 5: mod_base = OTHER; note = bicyclic nucleic acid (BNA)
  modified_base 19: mod_base = OTHER; note = bicyclic nucleic acid (BNA)
  modified_base 22: mod_base = OTHER; note = bicyclic nucleic acid (BNA)
  source 1..22: mol_type = other DNA
tcaaggaagatggcatttctag

SEQ ID NO: 13595 - DNA, 22 bp, synthetic construct
  misc_feature 1..22: note = Description of Artificial Sequence: Synthetic Antisense oligonucleotide
  modified_base 1: mod_base = OTHER; note = bicyclic nucleic acid (BNA)
  modified_base 6: mod_base = OTHER; note = bicyclic nucleic acid (BNA)
  modified_base 14: mod_base = OTHER; note = bicyclic nucleic acid (BNA)
  modified_base 22: mod_base = OTHER; note = bicyclic nucleic acid (BNA)
  source 1..22: mol_type = other DNA
tcaaggaagatggcatttctag

SEQ ID NO: 13596 - DNA, 22 bp, synthetic construct
  misc_feature 1..22: note = Description of Artificial Sequence: Synthetic Antisense oligonucleotide
  modified_base 1: mod_base = OTHER; note = bicyclic nucleic acid (BNA)
  modified_base 5: mod_base = OTHER; note = bicyclic nucleic acid (BNA)
  modified_base 13: mod_base = OTHER; note = bicyclic nucleic acid (BNA)
  modified_base 22: mod_base = OTHER; note = bicyclic nucleic acid (BNA)
  source 1..22: mol_type = other DNA
tcaaggaagatggcatttctag

SEQ ID NO: 13597 - DNA, 22 bp, synthetic construct
  misc_feature 1..22: note = Description of Artificial Sequence: Synthetic Antisense oligonucleotide
  modified_base 1..2: mod_base = OTHER; note = bicyclic nucleic acid (BNA)
  modified_base 12: mod_base = OTHER; note = bicyclic nucleic acid (BNA)
  modified_base 22: mod_base = OTHER; note = bicyclic nucleic acid (BNA)
  source 1..22: mol_type = other DNA
tcaaggaagatggcatttctag

SEQ ID NO: 13598 - DNA, 22 bp, synthetic construct
  misc_feature 1..22: note = Description of Artificial Sequence: Synthetic Antisense oligonucleotide
  modified_base 1: mod_base = OTHER; note = bicyclic nucleic acid (BNA)
  modified_base 6: mod_base = OTHER; note = bicyclic nucleic acid (BNA)
  modified_base 9: mod_base = OTHER; note = bicyclic nucleic acid (BNA)
  modified_base 22: mod_base = OTHER; note = bicyclic nucleic acid (BNA)
  source 1..22: mol_type = other DNA
tcaaggaagatggcatttctag

SEQ ID NO: 13599 - DNA, 22 bp, synthetic construct
  misc_feature 1..22: note = Description of Artificial Sequence: Synthetic Antisense oligonucleotide
  modified_base 1: mod_base = OTHER; note = bicyclic nucleic acid (BNA)
  modified_base 13..14: mod_base = OTHER; note = bicyclic nucleic acid (BNA)
  modified_base 22: mod_base = OTHER; note = bicyclic nucleic acid (BNA)
  source 1..22: mol_type = other DNA
tcaaggaagatggcatttctag

SEQ ID NO: 13600 - DNA, 22 bp, synthetic construct
  misc_feature 1..22: note = Description of Artificial Sequence: Synthetic Antisense oligonucleotide
  modified_base 1: mod_base = OTHER; note = bicyclic nucleic acid (BNA)
  modified_base 6: mod_base = OTHER; note = bicyclic nucleic acid (BNA)
  modified_base 13: mod_base = OTHER; note = bicyclic nucleic acid (BNA)
  modified_base 22: mod_base = OTHER; note = bicyclic nucleic acid (BNA)
  source 1..22: mol_type = other DNA
tcaaggaagatggcatttctag

SEQ ID NO: 13601 - DNA, 22 bp, synthetic construct
  misc_feature 1..22: note = Description of Artificial Sequence: Synthetic Antisense oligonucleotide
  modified_base 1: mod_base = OTHER; note = bicyclic nucleic acid (BNA)
  modified_base 6: mod_base = OTHER; note = bicyclic nucleic acid (BNA)
  modified_base 19: mod_base = OTHER; note = bicyclic nucleic acid (BNA)
  modified_base 22: mod_base = OTHER; note = bicyclic nucleic acid (BNA)
  source 1..22: mol_type = other DNA
tcaaggaagatggcatttctag

SEQ ID NO: 13602 - DNA, 22 bp, synthetic construct
  misc_feature 1..22: note = Description of Artificial Sequence: Synthetic Antisense oligonucleotide
  modified_base 1: mod_base = OTHER; note = bicyclic nucleic acid (BNA)
  modified_base 5: mod_base = OTHER; note = bicyclic nucleic acid (BNA)
  modified_base 14: mod_base = OTHER; note = bicyclic nucleic acid (BNA)
  modified_base 22: mod_base = OTHER; note = bicyclic nucleic acid (BNA)
  source 1..22: mol_type = other DNA
tcaaggaagatggcatttctag

SEQ ID NO: 13603 - DNA, 22 bp, synthetic construct
  misc_feature 1..22: note = Description of Artificial Sequence: Synthetic Antisense oligonucleotide
  modified_base 1..2: mod_base = OTHER; note = bicyclic nucleic acid (BNA)
  modified_base 6: mod_base = OTHER; note = bicyclic nucleic acid (BNA)
  modified_base 22: mod_base = OTHER; note = bicyclic nucleic acid (BNA)
  source 1..22: mol_type = other DNA
tcaaggaagatggcatttctag

SEQ ID NO: 13604 - DNA, 22 bp, synthetic construct
  misc_feature 1..22: note = Description of Artificial Sequence: Synthetic Antisense oligonucleotide
  modified_base 1: mod_base = OTHER; note = bicyclic nucleic acid (BNA)
  modified_base 12: mod_base = OTHER; note = bicyclic nucleic acid (BNA)
  modified_base 19: mod_base = OTHER; note = bicyclic nucleic acid (BNA)
  modified_base 22: mod_base = OTHER; note = bicyclic nucleic acid (BNA)
  source 1..22: mol_type = other DNA
tcaaggaagatggcatttctag

SEQ ID NO: 13605 - DNA, 22 bp, synthetic construct
  misc_feature 1..22: note = Description of Artificial Sequence: Synthetic Antisense oligonucleotide
  modified_base 1: mod_base = OTHER; note = bicyclic nucleic acid (BNA)
  modified_base 12: mod_base = OTHER; note = bicyclic nucleic acid (BNA)
  modified_base 14: mod_base = OTHER; note = bicyclic nucleic acid (BNA)
  modified_base 22: mod_base = OTHER; note = bicyclic nucleic acid (BNA)
  source 1..22: mol_type = other DNA
tcaaggaagatggcatttctag

SEQ ID NO: 13606 - DNA, 22 bp, synthetic construct
  misc_feature 1..22: note = Description of Artificial Sequence: Synthetic Antisense oligonucleotide
  modified_base 1: mod_base = OTHER; note = bicyclic nucleic acid (BNA)
  modified_base 6: mod_base = OTHER; note = bicyclic nucleic acid (BNA)
  modified_base 12: mod_base = OTHER; note = bicyclic nucleic acid (BNA)
  modified_base 22: mod_base = OTHER; note = bicyclic nucleic acid (BNA)
  source 1..22: mol_type = other DNA
tcaaggaagatggcatttctag

SEQ ID NO: 13607 - DNA, 22 bp, synthetic construct
  misc_feature 1..22: note = Description of Artificial Sequence: Synthetic Antisense oligonucleotide
  modified_base 1: mod_base = OTHER; note = bicyclic nucleic acid (BNA)
  modified_base 5..6: mod_base = OTHER; note = bicyclic nucleic acid (BNA)
  modified_base 22: mod_base = OTHER; note = bicyclic nucleic acid (BNA)
  source 1..22: mol_type = other DNA
tcaaggaagatggcatttctag

SEQ ID NO: 13608 - DNA, 22 bp, synthetic construct
  misc_feature 1..22: note = Description of Artificial Sequence: Synthetic Antisense oligonucleotide
  modified_base 1..2: mod_base = OTHER; note = bicyclic nucleic acid (BNA)
  modified_base 14: mod_base = OTHER; note = bicyclic nucleic acid (BNA)
  modified_base 22: mod_base = OTHER; note = bicyclic nucleic acid (BNA)
  source 1..22: mol_type = other DNA
tcaaggaagatggcatttctag

SEQ ID NO: 13609 - DNA, 22 bp, synthetic construct
  misc_feature 1..22: note = Description of Artificial Sequence: Synthetic Antisense oligonucleotide
  modified_base 1: mod_base = OTHER; note = bicyclic nucleic acid (BNA)
  modified_base 9: mod_base = OTHER; note = bicyclic nucleic acid (BNA)
  modified_base 12: mod_base = OTHER; note = bicyclic nucleic acid (BNA)
  modified_base 22: mod_base = OTHER; note = bicyclic nucleic acid (BNA)
  source 1..22: mol_type = other DNA
tcaaggaagatggcatttctag

SEQ ID NO: 13610 - DNA, 22 bp, synthetic construct
  misc_feature 1..22: note = Description of Artificial Sequence: Synthetic Antisense oligonucleotide
  modified_base 1..2: mod_base = OTHER; note = bicyclic nucleic acid (BNA)
  modified_base 5: mod_base = OTHER; note = bicyclic nucleic acid (BNA)
  modified_base 22: mod_base = OTHER; note = bicyclic nucleic acid (BNA)
  source 1..22: mol_type = other DNA
tcaaggaagatggcatttctag

SEQ ID NO: 13611 - DNA, 22 bp, synthetic construct
  misc_feature 1..22: note = Description of Artificial Sequence: Synthetic Antisense oligonucleotide
  modified_base 1: mod_base = OTHER; note = bicyclic nucleic acid (BNA)
  modified_base 13: mod_base = OTHER; note = bicyclic nucleic acid (BNA)
  modified_base 19: mod_base = OTHER; note = bicyclic nucleic acid (BNA)
  modified_base 22: mod_base = OTHER; note = bicyclic nucleic acid (BNA)
  source 1..22: mol_type = other DNA
tcaaggaagatggcatttctag

SEQ ID NO: 13612 - DNA, 22 bp, synthetic construct
  misc_feature 1..22: note = Description of Artificial Sequence: Synthetic Antisense oligonucleotide
  modified_base 1: mod_base = OTHER; note = bicyclic nucleic acid (BNA)
  modified_base 12..13: mod_base = OTHER; note = bicyclic nucleic acid (BNA)
  modified_base 22: mod_base = OTHER; note = bicyclic nucleic acid (BNA)
  source 1..22: mol_type = other DNA
tcaaggaagatggcatttctag

SEQ ID NO: 13613 - DNA, 22 bp, synthetic construct
  misc_feature 1..22: note = Description of Artificial Sequence: Synthetic Antisense oligonucleotide
  modified_base 1: mod_base = OTHER; note = bicyclic nucleic acid (BNA)
  modified_base 5: mod_base = OTHER; note = bicyclic nucleic acid (BNA)
  modified_base 12: mod_base = OTHER; note = bicyclic nucleic acid (BNA)
  modified_base 22: mod_base = OTHER; note = bicyclic nucleic acid (BNA)
  source 1..22: mol_type = other DNA
tcaaggaagatggcatttctag

SEQ ID NO: 13614 - DNA, 22 bp, synthetic construct
  misc_feature 1..22: note = Description of Artificial Sequence: Synthetic Antisense oligonucleotide
  modified_base 1..2: mod_base = OTHER; note = bicyclic nucleic acid (BNA)
  modified_base 13: mod_base = OTHER; note = bicyclic nucleic acid (BNA)
  modified_base 22: mod_base = OTHER; note = bicyclic nucleic acid (BNA)
  source 1..22: mol_type = other DNA
tcaaggaagatggcatttctag

SEQ ID NO: 13615 - DNA, 22 bp, synthetic construct
  misc_feature 1..22: note = Description of Artificial Sequence: Synthetic Antisense oligonucleotide
  modified_base 1: mod_base = OTHER; note = bicyclic nucleic acid (BNA)
  modified_base 9: mod_base = OTHER; note = bicyclic nucleic acid (BNA)
  modified_base 13: mod_base = OTHER; note = bicyclic nucleic acid (BNA)
  modified_base 22: mod_base = OTHER; note = bicyclic nucleic acid (BNA)
  source 1..22: mol_type = other DNA
tcaaggaagatggcatttctag

SEQ ID NO: 13616 - DNA, 22 bp, synthetic construct
  misc_feature 1..22: note = Description of Artificial Sequence: Synthetic Antisense oligonucleotide
  modified_base 1..2: mod_base = OTHER; note = bicyclic nucleic acid (BNA)
  modified_base 19: mod_base = OTHER; note = bicyclic nucleic acid (BNA)
  modified_base 22: mod_base = OTHER; note = bicyclic nucleic acid (BNA)
  source 1..22: mol_type = other DNA
tcaaggaagatggcatttctag

SEQ ID NO: 13617 - DNA, 22 bp, synthetic construct
  misc_feature 1..22: note = Description of Artificial Sequence: Synthetic Antisense oligonucleotide
  modified_base 1..2: mod_base = OTHER; note = bicyclic nucleic acid (BNA)
  modified_base 9: mod_base = OTHER; note = bicyclic nucleic acid (BNA)
  modified_base 22: mod_base = OTHER; note = bicyclic nucleic acid (BNA)
  source 1..22: mol_type = other DNA
tcaaggaagatggcatttctag

SEQ ID NO: 13618 - DNA, 22 bp, synthetic construct
  misc_feature 1..22: note = Description of Artificial Sequence: Synthetic Antisense oligonucleotide
  modified_base 1: mod_base = OTHER; note = bicyclic nucleic acid (BNA)
  modified_base 14: mod_base = OTHER; note = bicyclic nucleic acid (BNA)
  modified_base 19: mod_base = OTHER; note = bicyclic nucleic acid (BNA)
  modified_base 22: mod_base = OTHER; note = bicyclic nucleic acid (BNA)
  source 1..22: mol_type = other DNA
tcaaggaagatggcatttctag

SEQ ID NO: 13619 - DNA, 22 bp, synthetic construct
  misc_feature 1..22: note = Description of Artificial Sequence: Synthetic Antisense oligonucleotide
  modified_base 1: mod_base = OTHER; note = bicyclic nucleic acid (BNA)
  modified_base 9: mod_base = OTHER; note = bicyclic nucleic acid (BNA)
  modified_base 19: mod_base = OTHER; note = bicyclic nucleic acid (BNA)
  modified_base 22: mod_base = OTHER; note = bicyclic nucleic acid (BNA)
  source 1..22: mol_type = other DNA
tcaaggaagatggcatttctag

SEQ ID NO: 13620 - DNA, 18 bp, synthetic construct
  misc_feature 1..18: note = Description of Artificial Sequence: Synthetic Antisense oligonucleotide
  modified_base 1..2: mod_base = OTHER; note = bicyclic nucleic acid (BNA)
  modified_base 18: mod_base = OTHER; note = bicyclic nucleic acid (BNA)
  modified_base 9: mod_base = OTHER; note = 5-methyl
  modified_base 13..14: mod_base = OTHER; note = 5-methyl
  modified_base 18: mod_base = OTHER; note = 5-methyl
  source 1..18: mol_type = other DNA
ggtaagttctgtccaagc

SEQ ID NO: 13621 - DNA, 18 bp, synthetic construct
  misc_feature 1..18: note = Description of Artificial Sequence: Synthetic Antisense oligonucleotide
  modified_base 1: mod_base = OTHER; note = bicyclic nucleic acid (BNA)
  modified_base 9: mod_base = OTHER; note = bicyclic nucleic acid (BNA)
  modified_base 18: mod_base = OTHER; note = bicyclic nucleic acid (BNA)
  modified_base 9: mod_base = OTHER; note = 5-methyl
  modified_base 13..14: mod_base = OTHER; note = 5-methyl
  modified_base 18: mod_base = OTHER; note = 5-methyl
  source 1..18: mol_type = other DNA
ggtaagttctgtccaagc

SEQ ID NO: 13622 - DNA, 18 bp, synthetic construct
  misc_feature 1..18: note = Description of Artificial Sequence: Synthetic Antisense oligonucleotide
  modified_base 1: mod_base = OTHER; note = bicyclic nucleic acid (BNA)
  modified_base 11: mod_base = OTHER; note = bicyclic nucleic acid (BNA)
  modified_base 18: mod_base = OTHER; note = bicyclic nucleic acid (BNA)
  modified_base 9: mod_base = OTHER; note = 5-methyl
  modified_base 13..14: mod_base = OTHER; note = 5-methyl
  modified_base 18: mod_base = OTHER; note = 5-methyl
  source 1..18: mol_type = other DNA
ggtaagttctgtccaagc

SEQ ID NO: 13623 - DNA, 18 bp, synthetic construct
  misc_feature 1..18: note = Description of Artificial Sequence: Synthetic Antisense oligonucleotide
  modified_base 1: mod_base = OTHER; note = bicyclic nucleic acid (BNA)
  modified_base 6: mod_base = OTHER; note = bicyclic nucleic acid (BNA)
  modified_base 18: mod_base = OTHER; note = bicyclic nucleic acid (BNA)
  modified_base 9: mod_base = OTHER; note = 5-methyl
  modified_base 13..14: mod_base = OTHER; note = 5-methyl
  modified_base 18: mod_base = OTHER; note = 5-methyl
  source 1..18: mol_type = other DNA
ggtaagttctgtccaagc

SEQ ID NO: 13624 - DNA, 18 bp, synthetic construct
  misc_feature 1..18: note = Description of Artificial Sequence: Synthetic Antisense oligonucleotide
  modified_base 1: mod_base = OTHER; note = bicyclic nucleic acid (BNA)
  modified_base 17..18: mod_base = OTHER; note = bicyclic nucleic acid (BNA)
  modified_base 9: mod_base = OTHER; note = 5-methyl
  modified_base 13..14: mod_base = OTHER; note = 5-methyl
  modified_base 18: mod_base = OTHER; note = 5-methyl
  source 1..18: mol_type = other DNA
ggtaagttctgtccaagc

SEQ ID NO: 13625 - DNA, 18 bp, synthetic construct
  misc_feature 1..18: note = Description of Artificial Sequence: Synthetic Antisense oligonucleotide
  modified_base 1: mod_base = OTHER; note = bicyclic nucleic acid (BNA)
  modified_base 13: mod_base = OTHER; note = bicyclic nucleic acid (BNA)
  modified_base 18: mod_base = OTHER; note = bicyclic nucleic acid (BNA)
  modified_base 9: mod_base = OTHER; note = 5-methyl
  modified_base 13..14: mod_base = OTHER; note = 5-methyl
  modified_base 18: mod_base = OTHER; note = 5-methyl
  source 1..18: mol_type = other DNA
ggtaagttctgtccaagc

SEQ ID NO: 13626 - DNA, 18 bp, synthetic construct
  misc_feature 1..18: note = Description of Artificial Sequence: Synthetic Antisense oligonucleotide
  modified_base 1: mod_base = OTHER; note = bicyclic nucleic acid (BNA)
  modified_base 14: mod_base = OTHER; note = bicyclic nucleic acid (BNA)
  modified_base 18: mod_base = OTHER; note = bicyclic nucleic acid (BNA)
  modified_base 9: mod_base = OTHER; note = 5-methyl
  modified_base 13..14: mod_base = OTHER; note = 5-methyl
  modified_base 18: mod_base = OTHER; note = 5-methyl
  source 1..18: mol_type = other DNA
ggtaagttctgtccaagc

SEQ ID NO: 13627 - DNA, 18 bp, synthetic construct
  misc_feature 1..18: note = Description of Artificial Sequence: Synthetic Antisense oligonucleotide
  modified_base 1: mod_base = OTHER; note = bicyclic nucleic acid (BNA)
  modified_base 16: mod_base = OTHER; note = bicyclic nucleic acid (BNA)
  modified_base 18: mod_base = OTHER; note = bicyclic nucleic acid (BNA)
  modified_base 8: mod_base = OTHER; note = 5-methyl
  modified_base 12..13: mod_base = OTHER; note = 5-methyl
  modified_base 17..18: mod_base = OTHER; note = 5-methyl
  source 1..18: mol_type = other DNA
gtaagttctgtccaagcc

SEQ ID NO: 13628 - DNA, 18 bp, synthetic construct
  misc_feature 1..18: note = Description of Artificial Sequence: Synthetic Antisense oligonucleotide
  modified_base 1: mod_base = OTHER; note = bicyclic nucleic acid (BNA)
  modified_base 10: mod_base = OTHER; note = bicyclic nucleic acid (BNA)
  modified_base 18: mod_base = OTHER; note = bicyclic nucleic acid (BNA)
  modified_base 8: mod_base = OTHER; note = 5-methyl
  modified_base 12..13: mod_base = OTHER; note = 5-methyl
  modified_base 17..18: mod_base = OTHER; note = 5-methyl
  source 1..18: mol_type = other DNA
gtaagttctgtccaagcc

SEQ ID NO: 13629 - DNA, 18 bp, synthetic construct
  misc_feature 1..18: note = Description of Artificial Sequence: Synthetic Antisense oligonucleotide
  modified_base 1: mod_base = OTHER; note = bicyclic nucleic acid (BNA)
  modified_base 5: mod_base = OTHER; note = bicyclic nucleic acid (BNA)
  modified_base 18: mod_base = OTHER; note = bicyclic nucleic acid (BNA)
  modified_base 8: mod_base = OTHER; note = 5-methyl
  modified_base 12..13: mod_base = OTHER; note = 5-methyl
  modified_base 17..18: mod_base = OTHER; note = 5-methyl
  source 1..18: mol_type = other DNA
gtaagttctgtccaagcc

SEQ ID NO: 13630 - DNA, 18 bp, synthetic construct
  misc_feature 1..18: note = Description of Artificial Sequence: Synthetic Antisense oligonucleotide
  modified_base 1: mod_base = OTHER; note = bicyclic nucleic acid (BNA)
  modified_base 17..18: mod_base = OTHER; note = bicyclic nucleic acid (BNA)
  modified_base 8: mod_base = OTHER; note = 5-methyl
  modified_base 12..13: mod_base = OTHER; note = 5-methyl
  modified_base 17..18: mod_base = OTHER; note = 5-methyl
  source 1..18: mol_type = other DNA
gtaagttctgtccaagcc

SEQ ID NO: 13631 - DNA, 18 bp, synthetic construct
  misc_feature 1..18: note = Description of Artificial Sequence: Synthetic Antisense oligonucleotide
  modified_base 1: mod_base = OTHER; note = bicyclic nucleic acid (BNA)
  modified_base 12: mod_base = OTHER; note = bicyclic nucleic acid (BNA)
  modified_base 18: mod_base = OTHER; note = bicyclic nucleic acid (BNA)
  modified_base 8: mod_base = OTHER; note = 5-methyl
  modified_base 12..13: mod_base = OTHER; note = 5-methyl
  modified_base 17..18: mod_base = OTHER; note = 5-methyl
  source 1..18: mol_type = other DNA
gtaagttctgtccaagcc

SEQ ID NO: 13632 - DNA, 18 bp, synthetic construct
  misc_feature 1..18: note = Description of Artificial Sequence: Synthetic Antisense oligonucleotide
  modified_base 1: mod_base = OTHER; note = bicyclic nucleic acid (BNA)
  modified_base 13: mod_base = OTHER; note = bicyclic nucleic acid (BNA)
  modified_base 18: mod_base = OTHER; note = bicyclic nucleic acid (BNA)
  modified_base 8: mod_base = OTHER; note = 5-methyl
  modified_base 12..13: mod_base = OTHER; note = 5-methyl
  modified_base 17..18: mod_base = OTHER; note = 5-methyl
  source 1..18: mol_type = other DNA
gtaagttctgtccaagcc

SEQ ID NO: 13633 - DNA, 18 bp, synthetic construct
  misc_feature 1..18: note = Description of Artificial Sequence: Synthetic Antisense oligonucleotide
  modified_base 1: mod_base = OTHER; note = bicyclic nucleic acid (BNA)
  modified_base 8: mod_base = OTHER; note = bicyclic nucleic acid (BNA)
  modified_base 18: mod_base = OTHER; note = bicyclic nucleic acid (BNA)
  modified_base 8: mod_base = OTHER; note = 5-methyl
  modified_base 12..13: mod_base = OTHER; note = 5-methyl
  modified_base 17..18: mod_base = OTHER; note = 5-methyl
  source 1..18: mol_type = other DNA
gtaagttctgtccaagcc

SEQ ID NO: 13634 - DNA, 18 bp, synthetic construct
  misc_feature 1..18: note = Description of Artificial Sequence: Synthetic Antisense oligonucleotide
  modified_base 1..2: mod_base = OTHER; note = bicyclic nucleic acid (BNA)
  modified_base 18: mod_base = OTHER; note = bicyclic nucleic acid (BNA)
  modified_base 4: mod_base = OTHER; note = 5-methyl
  modified_base 13: mod_base = OTHER; note = 5-methyl
  modified_base 17..18: mod_base = OTHER; note = 5-methyl
  source 1..18: mol_type = other DNA
agtcggtaagttctgtcc

SEQ ID NO: 13635 - DNA, 18 bp, synthetic construct
  misc_feature 1..18: note = Description of Artificial Sequence: Synthetic Antisense oligonucleotide
  modified_base 1: mod_base = OTHER; note = bicyclic nucleic acid (BNA)
  modified_base 4: mod_base = OTHER; note = bicyclic nucleic acid (BNA)
  modified_base 18: mod_base = OTHER; note = bicyclic nucleic acid (BNA)
  modified_base 4: mod_base = OTHER; note = 5-methyl
  modified_base 13: mod_base = OTHER; note = 5-methyl
  modified_base 17..18: mod_base = OTHER; note = 5-methyl
  source 1..18: mol_type = other DNA
agtcggtaagttctgtcc

SEQ ID NO: 13636 - DNA, 18 bp, synthetic construct
  misc_feature 1..18: note = Description of Artificial Sequence: Synthetic Antisense oligonucleotide
  modified_base 1: mod_base = OTHER; note = bicyclic nucleic acid (BNA)
  modified_base 10: mod_base = OTHER; note = bicyclic nucleic acid (BNA)
  modified_base 18: mod_base = OTHER; note = bicyclic nucleic acid (BNA)
  modified_base 4: mod_base = OTHER; note = 5-methyl
  modified_base 13: mod_base = OTHER; note = 5-methyl
  modified_base 17..18: mod_base = OTHER; note = 5-methyl
  source 1..18: mol_type = other DNA
agtcggtaagttctgtcc

SEQ ID NO: 13637 - DNA, 18 bp, synthetic construct
  misc_feature 1..18: note = Description of Artificial Sequence: Synthetic Antisense oligonucleotide
  modified_base 1: mod_base = OTHER; note = bicyclic nucleic acid (BNA)
  modified_base 5: mod_base = OTHER; note = bicyclic nucleic acid (BNA)
  modified_base 18: mod_base = OTHER; note = bicyclic nucleic acid (BNA)
  modified_base 4: mod_base = OTHER; note = 5-methyl
  modified_base 13: mod_base = OTHER; note = 5-methyl
  modified_base 17..18: mod_base = OTHER; note = 5-methyl
  source 1..18: mol_type = other DNA
agtcggtaagttctgtcc

SEQ ID NO: 13638 - DNA, 18 bp, synthetic construct
  misc_feature 1..18: note = Description of Artificial Sequence: Synthetic Antisense oligonucleotide
  modified_base 1: mod_base = OTHER; note = bicyclic nucleic acid (BNA)
  modified_base 6: mod_base = OTHER; note = bicyclic nucleic acid (BNA)
  modified_base 18: mod_base = OTHER; note = bicyclic nucleic acid (BNA)
  modified_base 4: mod_base = OTHER; note = 5-methyl
  modified_base 13: mod_base = OTHER; note = 5-methyl
  modified_base 17..18: mod_base = OTHER; note = 5-methyl
  source 1..18: mol_type = other DNA
agtcggtaagttctgtcc

SEQ ID NO: 13639 - DNA, 18 bp, synthetic construct
  misc_feature 1..18: note = Description of Artificial Sequence: Synthetic Antisense oligonucleotide
  modified_base 1: mod_base = OTHER; note = bicyclic nucleic acid (BNA)
  modified_base 17..18: mod_base = OTHER; note = bicyclic nucleic acid (BNA)
  modified_base 4: mod_base = OTHER; note = 5-methyl
  modified_base 13: mod_base = OTHER; note = 5-methyl
  modified_base 17..18: mod_base = OTHER; note = 5-methyl
  source 1..18: mol_type = other DNA
agtcggtaagttctgtcc

SEQ ID NO: 13640 - DNA, 18 bp, synthetic construct
  misc_feature 1..18: note = Description of Artificial Sequence: Synthetic Antisense oligonucleotide
  modified_base 1: mod_base = OTHER; note = bicyclic nucleic acid (BNA)
  modified_base 13: mod_base = OTHER; note = bicyclic nucleic acid (BNA)
  modified_base 18: mod_base = OTHER; note = bicyclic nucleic acid (BNA)
  modified_base 4: mod_base = OTHER; note = 5-methyl
  modified_base 13: mod_base = OTHER; note = 5-methyl
  modified_base 17..18: mod_base = OTHER; note = 5-methyl
  source 1..18: mol_type = other DNA
agtcggtaagttctgtcc

SEQ ID NO: 13641 - DNA, 18 bp, synthetic construct
  misc_feature 1..18: note = Description of Artificial Sequence: Synthetic Antisense oligonucleotide
  modified_base 1: mod_base = OTHER; note = bicyclic nucleic acid (BNA)
  modified_base 15: mod_base = OTHER; note = bicyclic nucleic acid (BNA)
  modified_base 18: mod_base = OTHER; note = bicyclic nucleic acid (BNA)
  modified_base 4: mod_base = OTHER; note = 5-methyl
  modified_base 13: mod_base = OTHER; note = 5-methyl
  modified_base 17..18: mod_base = OTHER; note = 5-methyl
  source 1..18: mol_type = other DNA
agtcggtaagttctgtcc

SEQ ID NO: 13642 - DNA, 18 bp, synthetic construct
  misc_feature 1..18: note = Description of Artificial Sequence: Synthetic Antisense oligonucleotide
  modified_base 1: mod_base = OTHER; note = 5-methyl
  modified_base 5..6: mod_base = OTHER; note = 5-methyl
  modified_base 10..12: mod_base = OTHER; note = 5-methyl
  modified_base 1: mod_base = OTHER; note = bicyclic nucleic acid (BNA)
  modified_base 3: mod_base = OTHER; note = bicyclic nucleic acid (BNA)
  modified_base 18: mod_base = OTHER; note = bicyclic nucleic acid (BNA)
  source 1..18: mol_type = other DNA
ctgtccaagcccggttga

SEQ ID NO: 13643 - DNA, 18 bp, synthetic construct
  misc_feature 1..18: note = Description of Artificial Sequence: Synthetic Antisense oligonucleotide
  modified_base 1: mod_base = OTHER; note = 5-methyl
  modified_base 5..6: mod_base = OTHER; note = 5-methyl
  modified_base 10..12: mod_base = OTHER; note = 5-methyl
  modified_base 1: mod_base = OTHER; note = bicyclic nucleic acid (BNA)
  modified_base 9: mod_base = OTHER; note = bicyclic nucleic acid (BNA)
  modified_base 18: mod_base = OTHER; note = bicyclic nucleic acid (BNA)
  source 1..18: mol_type = other DNA
ctgtccaagcccggttga

SEQ ID NO: 13644 - DNA, 18 bp, synthetic construct
  misc_feature 1..18: note = Description of Artificial Sequence: Synthetic Antisense oligonucleotide
  modified_base 1: mod_base = OTHER; note = 5-methyl
  modified_base 5..6: mod_base = OTHER; note = 5-methyl
  modified_base 10..12: mod_base = OTHER; note = 5-methyl
  modified_base 1: mod_base = OTHER; note = bicyclic nucleic acid (BNA)
  modified_base 10: mod_base = OTHER; note = bicyclic nucleic acid (BNA)
  modified_base 18: mod_base = OTHER; note = bicyclic nucleic acid (BNA)
  source 1..18: mol_type = other DNA
ctgtccaagcccggttga

SEQ ID NO: 13645 - DNA, 18 bp, synthetic construct
  misc_feature 1..18: note = Description of Artificial Sequence: Synthetic Antisense oligonucleotide
  modified_base 1: mod_base = OTHER; note = 5-methyl
  modified_base 5..6: mod_base = OTHER; note = 5-methyl
  modified_base 10..12: mod_base = OTHER; note = 5-methyl
  modified_base 1: mod_base = OTHER; note = bicyclic nucleic acid (BNA)
  modified_base 5: mod_base = OTHER; note = bicyclic nucleic acid (BNA)
  modified_base 18: mod_base = OTHER; note = bicyclic nucleic acid (BNA)
  source 1..18: mol_type = other DNA
ctgtccaagcccggttga

SEQ ID NO: 13646 - DNA, 18 bp, synthetic construct
  misc_feature 1..18: note = Description of Artificial Sequence: Synthetic Antisense oligonucleotide
  modified_base 1: mod_base = OTHER; note = 5-methyl
  modified_base 5..6: mod_base = OTHER; note = 5-methyl
  modified_base 10..12: mod_base = OTHER; note = 5-methyl
  modified_base 1: mod_base = OTHER; note = bicyclic nucleic acid (BNA)
  modified_base 11: mod_base = OTHER; note = bicyclic nucleic acid (BNA)
  modified_base 18: mod_base = OTHER; note = bicyclic nucleic acid (BNA)
  source 1..18: mol_type = other DNA
ctgtccaagcccggttga

SEQ ID NO: 13647 - DNA, 18 bp, synthetic construct
  misc_feature 1..18: note = Description of Artificial Sequence: Synthetic Antisense oligonucleotide
  modified_base 1: mod_base = OTHER; note = 5-methyl
  modified_base 5..6: mod_base = OTHER; note = 5-methyl
  modified_base 10..12: mod_base = OTHER; note = 5-methyl
  modified_base 1: mod_base = OTHER; note = bicyclic nucleic acid (BNA)
  modified_base 6: mod_base = OTHER; note = bicyclic nucleic acid (BNA)
  modified_base 18: mod_base = OTHER; note = bicyclic nucleic acid (BNA)
  source 1..18: mol_type = other DNA
ctgtccaagcccggttga

SEQ ID NO: 13648 - DNA, 18 bp, synthetic construct
  misc_feature 1..18: note = Description of Artificial Sequence: Synthetic Antisense oligonucleotide
  modified_base 1: mod_base = OTHER; note = 5-methyl
  modified_base 5..6: mod_base = OTHER; note = 5-methyl
  modified_base 10..12: mod_base = OTHER; note = 5-methyl
  modified_base 1: mod_base = OTHER; note = bicyclic nucleic acid (BNA)
  modified_base 17..18: mod_base = OTHER; note = bicyclic nucleic acid (BNA)
  source 1..18: mol_type = other DNA
ctgtccaagcccggttga

SEQ ID NO: 13649 - DNA, 18 bp, synthetic construct
  misc_feature 1..18: note = Description of Artificial Sequence: Synthetic Antisense oligonucleotide
  modified_base 1: mod_base = OTHER; note = 5-methyl
  modified_base 5..6: mod_base = OTHER; note = 5-methyl
  modified_base 10..12: mod_base = OTHER; note = 5-methyl
  modified_base 1: mod_base = OTHER; note = bicyclic nucleic acid (BNA)
  modified_base 12: mod_base = OTHER; note = bicyclic nucleic acid (BNA)
  modified_base 18: mod_base = OTHER; note = bicyclic nucleic acid (BNA)
  source 1..18: mol_type = other DNA
ctgtccaagcccggttga

SEQ ID NO: 13650 - DNA, 18 bp, synthetic construct
  misc_feature 1..18: note = Description of Artificial Sequence: Synthetic Antisense oligonucleotide
  modified_base 1: mod_base = OTHER; note = 5-methyl
  modified_base 5..6: mod_base = OTHER; note = 5-methyl
  modified_base 10..12: mod_base = OTHER; note = 5-methyl
  modified_base 1: mod_base = OTHER; note = bicyclic nucleic acid (BNA)
  modified_base 13: mod_base = OTHER; note = bicyclic nucleic acid (BNA)
  modified_base 18: mod_base = OTHER; note = bicyclic nucleic acid (BNA)
  source 1..18: mol_type = other DNA
ctgtccaagcccggttga

SEQ ID NO: 13651 - DNA, 18 bp, synthetic construct
  misc_feature 1..18: note = Description of Artificial Sequence: Synthetic Antisense oligonucleotide
  modified_base 1: mod_base = OTHER; note = 5-methyl
  modified_base 5..6: mod_base = OTHER; note = 5-methyl
  modified_base 10..12: mod_base = OTHER; note = 5-methyl
  modified_base 1: mod_base = OTHER; note = bicyclic nucleic acid (BNA)
  modified_base 14: mod_base = OTHER; note = bicyclic nucleic acid (BNA)
  modified_base 18: mod_base = OTHER; note = bicyclic nucleic acid (BNA)
  source 1..18: mol_type = other DNA
ctgtccaagcccggttga

SEQ ID NO: 13652 - DNA, 18 bp, synthetic construct
  misc_feature 1..18: note = Description of Artificial Sequence: Synthetic Antisense oligonucleotide
  modified_base 1: mod_base = OTHER; note = bicyclic nucleic acid (BNA)
  modified_base 9: mod_base = OTHER; note = bicyclic nucleic acid (BNA)
  modified_base 14: mod_base = OTHER; note = bicyclic nucleic acid (BNA)
  modified_base 18: mod_base = OTHER; note = bicyclic nucleic acid (BNA)
  modified_base 9: mod_base = OTHER; note = 5-methyl
  modified_base 13..14: mod_base = OTHER; note = 5-methyl
  modified_base 18: mod_base = OTHER; note = 5-methyl
  source 1..18: mol_type = other DNA
ggtaagttctgtccaagc

SEQ ID NO: 13653 - DNA, 18 bp, synthetic construct
  misc_feature 1..18: note = Description of Artificial Sequence: Synthetic Antisense oligonucleotide
  modified_base 1: mod_base = OTHER; note = bicyclic nucleic acid (BNA)
  modified_base 6: mod_base = OTHER; note = bicyclic nucleic acid (BNA)
  modified_base 14: mod_base = OTHER; note = bicyclic nucleic acid (BNA)
  modified_base 18: mod_base = OTHER; note = bicyclic nucleic acid (BNA)
  modified_base 9: mod_base = OTHER; note = 5-methyl
  modified_base 13..14: mod_base = OTHER; note = 5-methyl
  modified_base 18: mod_base = OTHER; note = 5-methyl
  source 1..18: mol_type = other DNA
ggtaagttctgtccaagc

SEQ ID NO: 13654 - DNA, 18 bp, synthetic construct
  misc_feature 1..18: note = Description of Artificial Sequence: Synthetic Antisense oligonucleotide
  modified_base 1: mod_base = OTHER; note = bicyclic nucleic acid (BNA)
  modified_base 13: mod_base = OTHER; note = bicyclic nucleic acid (BNA)
  modified_base 17..18: mod_base = OTHER; note = bicyclic nucleic acid (BNA)
  modified_base 9: mod_base = OTHER; note = 5-methyl
  modified_base 13..14: mod_base = OTHER; note = 5-methyl
  modified_base 18: mod_base = OTHER; note = 5-methyl
  source 1..18: mol_type = other DNA
ggtaagttctgtccaagc

SEQ ID NO: 13655 - DNA, 18 bp, synthetic construct
  misc_feature 1..18: note = Description of Artificial Sequence: Synthetic Antisense oligonucleotide
  modified_base 1: mod_base = OTHER; note = bicyclic nucleic acid (BNA)
  modified_base 6: mod_base = OTHER; note = bicyclic nucleic acid (BNA)
  modified_base 9: mod_base = OTHER; note = bicyclic nucleic acid (BNA)
  modified_base 18: mod_base = OTHER; note = bicyclic nucleic acid (BNA)
  modified_base 9: mod_base = OTHER; note = 5-methyl
  modified_base 13..14: mod_base = OTHER; note = 5-methyl
  modified_base 18: mod_base = OTHER; note = 5-methyl
  source 1..18: mol_type = other DNA
ggtaagttctgtccaagc

SEQ ID NO: 13656 - DNA, 18 bp, synthetic construct
  misc_feature 1..18: note = Description of Artificial Sequence: Synthetic Antisense oligonucleotide
  modified_base 1: mod_base = OTHER; note = bicyclic nucleic acid (BNA)
  modified_base 13..14: mod_base = OTHER; note = bicyclic nucleic acid (BNA)
  modified_base 18: mod_base = OTHER; note = bicyclic nucleic acid (BNA)
  modified_base 9: mod_base = OTHER; note = 5-methyl
  modified_base 13..14: mod_base = OTHER; note = 5-methyl
  modified_base 18: mod_base = OTHER; note = 5-methyl
  source 1..18: mol_type = other DNA
ggtaagttctgtccaagc

SEQ ID NO: 13657 - DNA, 18 bp, synthetic construct
  misc_feature 1..18: note = Description of Artificial Sequence: Synthetic Antisense oligonucleotide
  modified_base 1..2: mod_base = OTHER; note = bicyclic nucleic acid (BNA)
  modified_base 17..18: mod_base = OTHER; note = bicyclic nucleic acid (BNA)
  modified_base 9: mod_base = OTHER; note = 5-methyl
  modified_base 13..14: mod_base = OTHER; note = 5-methyl
  modified_base 18: mod_base = OTHER; note = 5-methyl
  source 1..18: mol_type = other DNA
ggtaagttctgtccaagc

SEQ ID NO: 13658 - DNA, 18 bp, synthetic construct
  misc_feature 1..18: note = Description of Artificial Sequence: Synthetic Antisense oligonucleotide
  modified_base 1: mod_base = OTHER; note = bicyclic nucleic acid (BNA)
  modified_base 6: mod_base = OTHER; note = bicyclic nucleic acid (BNA)
  modified_base 13: mod_base = OTHER; note = bicyclic nucleic acid (BNA)
  modified_base 18: mod_base = OTHER; note = bicyclic nucleic acid (BNA)
  modified_base 9: mod_base = OTHER; note = 5-methyl
  modified_base 13..14: mod_base = OTHER; note = 5-methyl
  modified_base 18: mod_base = OTHER; note = 5-methyl
  source 1..18: mol_type = other DNA
ggtaagttctgtccaagc

SEQ ID NO: 13659 - DNA, 18 bp, synthetic construct
  misc_feature 1..18: note = Description of Artificial Sequence: Synthetic Antisense oligonucleotide
  modified_base 1: mod_base = OTHER; note = bicyclic nucleic acid (BNA)
  modified_base 9: mod_base = OTHER; note = bicyclic nucleic acid (BNA)
  modified_base 11: mod_base = OTHER; note = bicyclic nucleic acid (BNA)
  modified_base 18: mod_base = OTHER; note = bicyclic nucleic acid (BNA)
  modified_base 9: mod_base = OTHER; note = 5-methyl
  modified_base 13..14: mod_base = OTHER; note = 5-methyl
  modified_base 18: mod_base = OTHER; note = 5-methyl
  source 1..18: mol_type = other DNA
ggtaagttctgtccaagc

SEQ ID NO: 13660 - DNA, 18 bp, synthetic construct
  misc_feature 1..18: note = Description of Artificial Sequence: Synthetic Antisense oligonucleotide
  modified_base 1: mod_base = OTHER; note = bicyclic nucleic acid (BNA)
  modified_base 14: mod_base = OTHER; note = bicyclic nucleic acid (BNA)
  modified_base 17..18: mod_base = OTHER; note = bicyclic nucleic acid (BNA)
  modified_base 9: mod_base = OTHER; note = 5-methyl
  modified_base 13..14: mod_base = OTHER; note = 5-methyl
  modified_base 18: mod_base = OTHER; note = 5-methyl
  source 1..18: mol_type = other DNA
ggtaagttctgtccaagc

SEQ ID NO: 13661 - DNA, 18 bp, synthetic construct
  misc_feature 1..18: note = Description of Artificial Sequence: Synthetic Antisense oligonucleotide
  modified_base 1: mod_base = OTHER; note = bicyclic nucleic acid (BNA)
  modified_base 11: mod_base = OTHER; note = bicyclic nucleic acid (BNA)
  modified_base 13: mod_base = OTHER; note = bicyclic nucleic acid (BNA)
  modified_base 18: mod_base = OTHER; note = bicyclic nucleic acid (BNA)
  modified_base 9: mod_base = OTHER; note = 5-methyl
  modified_base 13..14: mod_base = OTHER; note = 5-methyl
  modified_base 18: mod_base = OTHER; note = 5-methyl
  source 1..18: mol_type = other DNA
ggtaagttctgtccaagc

SEQ ID NO: 13662 - DNA, 18 bp, synthetic construct
  misc_feature 1..18: note = Description of Artificial Sequence: Synthetic Antisense oligonucleotide
  modified_base 1..2: mod_base = OTHER; note = bicyclic nucleic acid (BNA)
  modified_base 6: mod_base = OTHER; note = bicyclic nucleic acid (BNA)
  modified_base 18: mod_base = OTHER; note = bicyclic nucleic acid (BNA)
  modified_base 9: mod_base = OTHER; note = 5-methyl
  modified_base 13..14: mod_base = OTHER; note = 5-methyl
  modified_base 18: mod_base = OTHER; note = 5-methyl
  source 1..18: mol_type = other DNA
ggtaagttctgtccaagc

SEQ ID NO: 13663 - DNA, 18 bp, synthetic construct
  misc_feature 1..18: note = Description of Artificial Sequence: Synthetic Antisense oligonucleotide
  modified_base 1..2: mod_base = OTHER; note = bicyclic nucleic acid (BNA)
  modified_base 11: mod_base = OTHER; note = bicyclic nucleic acid (BNA)
  modified_base 18: mod_base = OTHER; note = bicyclic nucleic acid (BNA)
  modified_base 9: mod_base = OTHER; note = 5-methyl
  modified_base 13..14: mod_base = OTHER; note = 5-methyl
  modified_base 18: mod_base = OTHER; note = 5-methyl
  source 1..18: mol_type = other DNA
ggtaagttctgtccaagc

SEQ ID NO: 13664 - DNA, 18 bp, synthetic construct
  misc_feature 1..18: note = Description of Artificial Sequence: Synthetic Antisense oligonucleotide
  modified_base 1: mod_base = OTHER; note = bicyclic nucleic acid (BNA)
  modified_base 9: mod_base = OTHER; note = bicyclic nucleic acid (BNA)
  modified_base 17..18: mod_base = OTHER; note = bicyclic nucleic acid (BNA)
  modified_base 9: mod_base = OTHER; note = 5-methyl
  modified_base 13..14: mod_base = OTHER; note = 5-methyl
  modified_base 18: mod_base = OTHER; note = 5-methyl
  source 1..18: mol_type = other DNA
ggtaagttctgtccaagc

SEQ ID NO: 13665 - DNA, 18 bp, synthetic construct
  misc_feature 1..18: note = Description of Artificial Sequence: Synthetic Antisense oligonucleotide
  modified_base 1..2: mod_base = OTHER; note = bicyclic nucleic acid (BNA)
  modified_base 14: mod_base = OTHER; note = bicyclic nucleic acid (BNA)
  modified_base 18: mod_base = OTHER; note = bicyclic nucleic acid (BNA)
  modified_base 9: mod_base = OTHER; note = 5-methyl
  modified_base 13..14: mod_base = OTHER; note = 5-methyl
  modified_base 18: mod_base = OTHER; note = 5-methyl
  source 1..18: mol_type = other DNA
ggtaagttctgtccaagc

SEQ ID NO: 13666 - DNA, 18 bp, synthetic construct
  misc_feature 1..18: note = Description of Artificial Sequence: Synthetic Antisense oligonucleotide
  modified_base 1: mod_base = OTHER; note = bicyclic nucleic acid (BNA)
  modified_base 11: mod_base = OTHER; note = bicyclic nucleic acid (BNA)
  modified_base 14: mod_base = OTHER; note = bicyclic nucleic acid (BNA)
  modified_base 18: mod_base = OTHER; note = bicyclic nucleic acid (BNA)
  modified_base 9: mod_base = OTHER; note = 5-methyl
  modified_base 13..14: mod_base = OTHER; note = 5-methyl
  modified_base 18: mod_base = OTHER; note = 5-methyl
  source 1..18: mol_type = other DNA
ggtaagttctgtccaagc

SEQ ID NO: 13667 - DNA, 18 bp, synthetic construct
  misc_feature 1..18: note = Description of Artificial Sequence: Synthetic Antisense oligonucleotide
  modified_base 1: mod_base = OTHER; note = bicyclic nucleic acid (BNA)
  modified_base 6: mod_base = OTHER; note = bicyclic nucleic acid (BNA)
  modified_base 11: mod_base = OTHER; note = bicyclic nucleic acid (BNA)
  modified_base 18: mod_base = OTHER; note = bicyclic nucleic acid (BNA)
  modified_base 9: mod_base = OTHER; note = 5-methyl
  modified_base 13..14: mod_base = OTHER; note = 5-methyl
  modified_base 18: mod_base = OTHER; note = 5-methyl
  source 1..18: mol_type = other DNA
ggtaagttctgtccaagc

SEQ ID NO: 13668 - DNA, 18 bp, synthetic construct
  misc_feature 1..18: note = Description of Artificial Sequence: Synthetic Antisense oligonucleotide
  modified_base 1..2: mod_base = OTHER; note = bicyclic nucleic acid (BNA)
  modified_base 13: mod_base = OTHER; note = bicyclic nucleic acid (BNA)
  modified_base 18: mod_base = OTHER; note = bicyclic nucleic acid (BNA)
  modified_base 9: mod_base = OTHER; note = 5-methyl
  modified_base 13..14: mod_base = OTHER; note = 5-methyl
  modified_base 18: mod_base = OTHER; note = 5-methyl
  source 1..18: mol_type = other DNA
ggtaagttctgtccaagc

SEQ ID NO: 13669 - DNA, 18 bp, synthetic construct
  misc_feature 1..18: note = Description of Artificial Sequence: Synthetic Antisense oligonucleotide
  modified_base 1: mod_base = OTHER; note = bicyclic nucleic acid (BNA)
  modified_base 9: mod_base = OTHER; note = bicyclic nucleic acid (BNA)
  modified_base 13: mod_base = OTHER; note = bicyclic nucleic acid (BNA)
  modified_base 18: mod_base = OTHER; note = bicyclic nucleic acid (BNA)
  modified_base 9: mod_base = OTHER; note = 5-methyl
  modified_base 13..14: mod_base = OTHER; note = 5-methyl
  modified_base 18: mod_base = OTHER; note = 5-methyl
  source 1..18: mol_type = other DNA
ggtaagttctgtccaagc

SEQ ID NO: 13670 - DNA, 18 bp, synthetic construct
  misc_feature 1..18: note = Description of Artificial Sequence: Synthetic Antisense oligonucleotide
  modified_base 1: mod_base = OTHER; note = bicyclic nucleic acid (BNA)
  modified_base 6: mod_base = OTHER; note = bicyclic nucleic acid (BNA)
  modified_base 17..18: mod_base = OTHER; note = bicyclic nucleic acid (BNA)
  modified_base 9: mod_base = OTHER; note = 5-methyl
  modified_base 13..14: mod_base = OTHER; note = 5-methyl
  modified_base 18: mod_base = OTHER; note = 5-methyl
  source 1..18: mol_type = other DNA
ggtaagttctgtccaagc

SEQ ID NO: 13671 - DNA, 18 bp, synthetic construct
  misc_feature 1..18: note = Description of Artificial Sequence: Synthetic Antisense oligonucleotide
  modified_base 1: mod_base = OTHER; note = bicyclic nucleic acid (BNA)
  modified_base 11: mod_base = OTHER; note = bicyclic nucleic acid (BNA)
  modified_base 17..18: mod_base = OTHER; note = bicyclic nucleic acid (BNA)
  modified_base 9: mod_base = OTHER; note = 5-methyl
  modified_base 13..14: mod_base = OTHER; note = 5-methyl
  modified_base 18: mod_base = OTHER; note = 5-methyl
  source 1..18: mol_type = other DNA
ggtaagttctgtccaagc

SEQ ID NO: 13672 - DNA, 18 bp, synthetic construct
  misc_feature 1..18: note = Description of Artificial Sequence: Synthetic Antisense oligonucleotide
  modified_base 1..2: mod_base = OTHER; note = bicyclic nucleic acid (BNA)
  modified_base 9: mod_base = OTHER; note = bicyclic nucleic acid (BNA)
  modified_base 18: mod_base = OTHER; note = bicyclic nucleic acid (BNA)
  modified_base 9: mod_base = OTHER; note = 5-methyl
  modified_base 13..14: mod_base = OTHER; note = 5-methyl
  modified_base 18: mod_base = OTHER; note = 5-methyl
  source 1..18: mol_type = other DNA
ggtaagttctgtccaagc

SEQ ID NO: 13673 - DNA, 18 bp, synthetic construct
  misc_feature 1..18: note = Description of Artificial Sequence: Synthetic Antisense oligonucleotide
  modified_base 1: mod_base = OTHER; note = bicyclic nucleic acid (BNA)
  modified_base 12: mod_base = OTHER; note = bicyclic nucleic acid (BNA)
  modified_base 17..18: mod_base = OTHER; note = bicyclic nucleic acid (BNA)
  modified_base 8: mod_base = OTHER; note = 5-methyl
  modified_base 12..13: mod_base = OTHER; note = 5-methyl
  modified_base 17..18: mod_base = OTHER; note = 5-methyl
  source 1..18: mol_type = other DNA
gtaagttctgtccaagcc

SEQ ID NO: 13674 - DNA, 18 bp, synthetic construct
  misc_feature 1..18: note = Description of Artificial Sequence: Synthetic Antisense oligonucleotide
  modified_base 1: mod_base = OTHER; note = bicyclic nucleic acid (BNA)
  modified_base 5: mod_base = OTHER; note = bicyclic nucleic acid (BNA)
  modified_base 8: mod_base = OTHER; note = bicyclic nucleic acid (BNA)
  modified_base 18: mod_base = OTHER; note = bicyclic nucleic acid (BNA)
  modified_base 8: mod_base = OTHER; note = 5-methyl
  modified_base 12..13: mod_base = OTHER; note = 5-methyl
  modified_base 17..18: mod_base = OTHER; note = 5-methyl
  source 1..18: mol_type = other DNA
gtaagttctgtccaagcc

SEQ ID NO: 13675 - DNA, 18 bp, synthetic construct
  misc_feature 1..18: note = Description of Artificial Sequence: Synthetic Antisense oligonucleotide
  modified_base 1: mod_base = OTHER; note = bicyclic nucleic acid (BNA)
  modified_base 8: mod_base = OTHER; note = bicyclic nucleic acid (BNA)
  modified_base 13: mod_base = OTHER; note = bicyclic nucleic acid (BNA)
  modified_base 18: mod_base = OTHER; note = bicyclic nucleic acid (BNA)
  modified_base 8: mod_base = OTHER; note = 5-methyl
  modified_base 12..13: mod_base = OTHER; note = 5-methyl
  modified_base 17..18: mod_base = OTHER; note = 5-methyl
  source 1..18: mol_type = other DNA
gtaagttctgtccaagcc

SEQ ID NO: 13676 - DNA, 18 bp, synthetic construct
  misc_feature 1..18: note = Description of Artificial Sequence: Synthetic Antisense oligonucleotide
  modified_base 1: mod_base = OTHER; note = bicyclic nucleic acid (BNA)
  modified_base 5: mod_base = OTHER; note = bicyclic nucleic acid (BNA)
  modified_base 13: mod_base = OTHER; note = bicyclic nucleic acid (BNA)
  modified_base 18: mod_base = OTHER; note = bicyclic nucleic acid (BNA)
  modified_base 8: mod_base = OTHER; note = 5-methyl
  modified_base 12..13: mod_base = OTHER; note = 5-methyl
  modified_base 17..18: mod_base = OTHER; note = 5-methyl
  source 1..18: mol_type = other DNA
gtaagttctgtccaagcc

SEQ ID NO: 13677 - DNA, 18 bp, synthetic construct
  misc_feature 1..18: note = Description of Artificial Sequence: Synthetic Antisense oligonucleotide
  modified_base 1: mod_base = OTHER; note = bicyclic nucleic acid (BNA)
  modified_base 8: mod_base = OTHER; note = bicyclic nucleic acid (BNA)
  modified_base 17..18: mod_base = OTHER; note = bicyclic nucleic acid (BNA)
  modified_base 8: mod_base = OTHER; note = 5-methyl
  modified_base 12..13: mod_base = OTHER; note = 5-methyl
  modified_base 17..18: mod_base = OTHER; note = 5-methyl
  source 1..18: mol_type = other DNA
gtaagttctgtccaagcc

SEQ ID NO: 13678 - DNA, 18 bp, synthetic construct
  misc_feature 1..18: note = Description of Artificial Sequence: Synthetic Antisense oligonucleotide
  modified_base 1: mod_base = OTHER; note = bicyclic nucleic acid (BNA)
  modified_base 13: mod_base = OTHER; note = bicyclic nucleic acid (BNA)
  modified_base 17..18: mod_base = OTHER; note = bicyclic nucleic acid (BNA)
  modified_base 8: mod_base = OTHER; note = 5-methyl
  modified_base 12..13: mod_base = OTHER; note = 5-methyl
  modified_base 17..18: mod_base = OTHER; note = 5-methyl
  source 1..18: mol_type = other DNA
gtaagttctgtccaagcc

SEQ ID NO: 13679 - DNA, 18 bp, synthetic construct
  misc_feature 1..18: note = Description of Artificial Sequence: Synthetic Antisense oligonucleotide
  modified_base 1: mod_base = OTHER; note = bicyclic nucleic acid (BNA)
  modified_base 8: mod_base = OTHER; note = bicyclic nucleic acid (BNA)
  modified_base 12: mod_base = OTHER; note = bicyclic nucleic acid (BNA)
  modified_base 18: mod_base = OTHER; note = bicyclic nucleic acid (BNA)
  modified_base 8: mod_base = OTHER; note = 5-methyl
  modified_base 12..13: mod_base = OTHER; note = 5-methyl
  modified_base 17..18: mod_base = OTHER; note = 5-methyl
  source 1..18: mol_type = other DNA
gtaagttctgtccaagcc

SEQ ID NO: 13680 - DNA, 18 bp, synthetic construct
  misc_feature 1..18: note = Description of Artificial Sequence: Synthetic Antisense oligonucleotide
  modified_base 1: mod_base = OTHER; note = bicyclic nucleic acid (BNA)
  modified_base 5: mod_base = OTHER; note = bicyclic nucleic acid (BNA)
  modified_base 10: mod_base = OTHER; note = bicyclic nucleic acid (BNA)
  modified_base 18: mod_base = OTHER; note = bicyclic nucleic acid (BNA)
  modified_base 8: mod_base = OTHER; note = 5-methyl
  modified_base 12..13: mod_base = OTHER; note = 5-methyl
  modified_base 17..18: mod_base = OTHER; note = 5-methyl
  source 1..18: mol_type = other DNA
gtaagttctgtccaagcc

SEQ ID NO: 13681 - DNA, 18 bp, synthetic construct
  misc_feature 1..18: note = Description of Artificial Sequence: Synthetic Antisense oligonucleotide
  modified_base 1: mod_base = OTHER; note = bicyclic nucleic acid (BNA)
  modified_base 8: mod_base = OTHER; note = bicyclic nucleic acid (BNA)
  modified_base 16: mod_base = OTHER; note = bicyclic nucleic acid (BNA)
  modified_base 18: mod_base = OTHER; note = bicyclic nucleic acid (BNA)
  modified_base 8: mod_base = OTHER; note = 5-methyl
  modified_base 12..13: mod_base = OTHER; note = 5-methyl
  modified_base 17..18: mod_base = OTHER; note = 5-methyl
  source 1..18: mol_type = other DNA
gtaagttctgtccaagcc

SEQ ID NO: 13682 - DNA, 18 bp, synthetic construct
  misc_feature 1..18: note = Description of Artificial Sequence: Synthetic Antisense oligonucleotide
  modified_base 1: mod_base = OTHER; note = bicyclic nucleic acid (BNA)
  modified_base 10: mod_base = OTHER; note = bicyclic nucleic acid (BNA)
  modified_base 16: mod_base = OTHER; note = bicyclic nucleic acid (BNA)
  modified_base 18: mod_base = OTHER; note = bicyclic nucleic acid (BNA)
  modified_base 8: mod_base = OTHER; note = 5-methyl
  modified_base 12..13: mod_base = OTHER; note = 5-methyl
  modified_base 17..18: mod_base = OTHER; note = 5-methyl
  source 1..18: mol_type = other DNA
gtaagttctgtccaagcc

SEQ ID NO: 13683 - DNA, 18 bp, synthetic construct
  misc_feature 1..18: note = Description of Artificial Sequence: Synthetic Antisense oligonucleotide
  modified_base 1: mod_base = OTHER; note = bicyclic nucleic acid (BNA)
  modified_base 10: mod_base = OTHER; note = bicyclic nucleic acid (BNA)
  modified_base 12: mod_base = OTHER; note = bicyclic nucleic acid (BNA)
  modified_base 18: mod_base = OTHER; note = bicyclic nucleic acid (BNA)
  modified_base 8: mod_base = OTHER; note = 5-methyl
  modified_base 12..13: mod_base = OTHER; note = 5-methyl
  modified_base 17..18: mod_base = OTHER; note = 5-methyl
  source 1..18: mol_type = other DNA
gtaagttctgtccaagcc

SEQ ID NO: 13684 - DNA, 18 bp, synthetic construct
  misc_feature 1..18: note = Description of Artificial Sequence: Synthetic Antisense oligonucleotide
  modified_base 1: mod_base = OTHER; note = bicyclic nucleic acid (BNA)
  modified_base 5: mod_base = OTHER; note = bicyclic nucleic acid (BNA)
  modified_base 17..18: mod_base = OTHER; note = bicyclic nucleic acid (BNA)
  modified_base 8: mod_base = OTHER; note = 5-methyl
  modified_base 12..13: mod_base = OTHER; note = 5-methyl
  modified_base 17..18: mod_base = OTHER; note = 5-methyl
  source 1..18: mol_type = other DNA
gtaagttctgtccaagcc

SEQ ID NO: 13685 - DNA, 18 bp, synthetic construct
  misc_feature 1..18: note = Description of Artificial Sequence: Synthetic Antisense oligonucleotide
  modified_base 1: mod_base = OTHER; note = bicyclic nucleic acid (BNA)
  modified_base 10: mod_base = OTHER; note = bicyclic nucleic acid (BNA)
  modified_base 17..18: mod_base = OTHER; note = bicyclic nucleic acid (BNA)
  modified_base 8: mod_base = OTHER; note = 5-methyl
  modified_base 12..13: mod_base = OTHER; note = 5-methyl
  modified_base 17..18: mod_base = OTHER; note = 5-methyl
  source 1..18: mol_type = other DNA
gtaagttctgtccaagcc

SEQ ID NO: 13686 - DNA, 18 bp, synthetic construct
  misc_feature 1..18: note = Description of Artificial Sequence: Synthetic Antisense oligonucleotide
  modified_base 1: mod_base = OTHER; note = bicyclic nucleic acid (BNA)
  modified_base 12..13: mod_base = OTHER; note = bicyclic nucleic acid (BNA)
  modified_base 18: mod_base = OTHER; note = bicyclic nucleic acid (BNA)
  modified_base 8: mod_base = OTHER; note = 5-methyl
  modified_base 12..13: mod_base = OTHER; note = 5-methyl
  modified_base 17..18: mod_base = OTHER; note = 5-methyl
  source 1..18: mol_type = other DNA
gtaagttctgtccaagcc

SEQ ID NO: 13687 - DNA, 18 bp, synthetic construct
  misc_feature 1..18: note = Description of Artificial Sequence: Synthetic Antisense oligonucleotide
  modified_base 1: mod_base = OTHER; note = bicyclic nucleic acid (BNA)
  modified_base 5: mod_base = OTHER; note = bicyclic nucleic acid (BNA)
  modified_base 12: mod_base = OTHER; note = bicyclic nucleic acid (BNA)
  modified_base 18: mod_base = OTHER; note = bicyclic nucleic acid (BNA)
  modified_base 8: mod_base = OTHER; note = 5-methyl
  modified_base 12..13: mod_base = OTHER; note = 5-methyl
  modified_base 17..18: mod_base = OTHER; note = 5-methyl
  source 1..18: mol_type = other DNA
gtaagttctgtccaagcc

SEQ ID NO: 13688 - DNA, 18 bp, synthetic construct
  misc_feature 1..18: note = Description of Artificial Sequence: Synthetic Antisense oligonucleotide
  modified_base 1: mod_base = OTHER; note = bicyclic nucleic acid (BNA)
  modified_base 8: mod_base = OTHER; note = bicyclic nucleic acid (BNA)
  modified_base 10: mod_base = OTHER; note = bicyclic nucleic acid (BNA)
  modified_base 18: mod_base = OTHER; note = bicyclic nucleic acid (BNA)
  modified_base 8: mod_base = OTHER; note = 5-methyl
  modified_base 12..13: mod_base = OTHER; note = 5-methyl
  modified_base 17..18: mod_base = OTHER; note = 5-methyl
  source 1..18: mol_type = other DNA
gtaagttctgtccaagcc

SEQ ID NO: 13689 - DNA, 18 bp, synthetic construct
  misc_feature 1..18: note = Description of Artificial Sequence: Synthetic Antisense oligonucleotide
  modified_base 1: mod_base = OTHER; note = bicyclic nucleic acid (BNA)
  modified_base 13: mod_base = OTHER; note = bicyclic nucleic acid (BNA)
  modified_base 16: mod_base = OTHER; note = bicyclic nucleic acid (BNA)
  modified_base 18: mod_base = OTHER; note = bicyclic nucleic acid (BNA)
  modified_base 8: mod_base = OTHER; note = 5-methyl
  modified_base 12..13: mod_base = OTHER; note = 5-methyl
  modified_base 17..18: mod_base = OTHER; note = 5-methyl
  source 1..18: mol_type = other DNA
gtaagttctgtccaagcc

SEQ ID NO: 13690 - DNA, 18 bp, synthetic construct
  misc_feature 1..18: note = Description of Artificial Sequence: Synthetic Antisense oligonucleotide
  modified_base 1: mod_base = OTHER; note = bicyclic nucleic acid (BNA)
  modified_base 5: mod_base = OTHER; note = bicyclic nucleic acid (BNA)
  modified_base 16: mod_base = OTHER; note = bicyclic nucleic acid (BNA)
  modified_base 18: mod_base = OTHER; note = bicyclic nucleic acid (BNA)
  modified_base 8: mod_base = OTHER; note = 5-methyl
  modified_base 12..13: mod_base = OTHER; note = 5-methyl
  modified_base 17..18: mod_base = OTHER; note = 5-methyl
  source 1..18: mol_type = other DNA
gtaagttctgtccaagcc

SEQ ID NO: 13691 - DNA, 18 bp, synthetic construct
  misc_feature 1..18: note = Description of Artificial Sequence: Synthetic Antisense oligonucleotide
  modified_base 1: mod_base = OTHER; note = bicyclic nucleic acid (BNA)
  modified_base 12: mod_base = OTHER; note = bicyclic nucleic acid (BNA)
  modified_base 16: mod_base = OTHER; note = bicyclic nucleic acid (BNA)
  modified_base 18: mod_base = OTHER; note = bicyclic nucleic acid (BNA)
  modified_base 8: mod_base = OTHER; note = 5-methyl
  modified_base 12..13: mod_base = OTHER; note = 5-methyl
  modified_base 17..18: mod_base = OTHER; note = 5-methyl
  source 1..18: mol_type = other DNA
gtaagttctgtccaagcc

SEQ ID NO: 13692 - DNA, 18 bp, synthetic construct
  misc_feature 1..18: note = Description of Artificial Sequence: Synthetic Antisense oligonucleotide
  modified_base 1: mod_base = OTHER; note = bicyclic nucleic acid (BNA)
  modified_base 16..18: mod_base = OTHER; note = bicyclic nucleic acid (BNA)
  modified_base 8: mod_base = OTHER; note = 5-methyl
  modified_base 12..13: mod_base = OTHER; note = 5-methyl
  modified_base 17..18: mod_base = OTHER; note = 5-methyl
  source 1..18: mol_type = other DNA
gtaagttctgtccaagcc

SEQ ID NO: 13693 - DNA, 18 bp, synthetic construct
  misc_feature 1..18: note = Description of Artificial Sequence: Synthetic Antisense oligonucleotide
  modified_base 1: mod_base = OTHER; note = bicyclic nucleic acid (BNA)
  modified_base 10: mod_base = OTHER; note = bicyclic nucleic acid (BNA)
  modified_base 13: mod_base = OTHER; note = bicyclic nucleic acid (BNA)
  modified_base 18: mod_base = OTHER; note = bicyclic nucleic acid (BNA)
  modified_base 8: mod_base = OTHER; note = 5-methyl
  modified_base 12..13: mod_base = OTHER; note = 5-methyl
  modified_base 17..18: mod_base = OTHER; note = 5-methyl
  source 1..18: mol_type = other DNA
gtaagttctgtccaagcc

SEQ ID NO: 13694 - DNA, 18 bp, synthetic construct
  misc_feature 1..18: note = Description of Artificial Sequence: Synthetic Antisense oligonucleotide
  modified_base 1: mod_base = OTHER; note = bicyclic nucleic acid (BNA)
  modified_base 6: mod_base = OTHER; note = bicyclic nucleic acid (BNA)
  modified_base 10: mod_base = OTHER; note = bicyclic nucleic acid (BNA)
  modified_base 18: mod_base = OTHER; note = bicyclic nucleic acid (BNA)
  modified_base 4: mod_base = OTHER; note = 5-methyl
  modified_base 13: mod_base = OTHER; note = 5-methyl
  modified_base 17..18: mod_base = OTHER; note = 5-methyl
  source 1..18: mol_type = other DNA
agtcggtaagttctgtcc

SEQ ID NO: 13695 - DNA, 18 bp, synthetic construct
  misc_feature 1..18: note = Description of Artificial Sequence: Synthetic Antisense oligonucleotide
  modified_base 1..2: mod_base = OTHER; note = bicyclic nucleic acid (BNA)
  modified_base 4: mod_base = OTHER; note = bicyclic nucleic acid (BNA)
  modified_base 18: mod_base = OTHER; note = bicyclic nucleic acid (BNA)
  modified_base 4: mod_base = OTHER; note = 5-methyl
  modified_base 13: mod_base = OTHER; note = 5-methyl
  modified_base 17..18: mod_base = OTHER; note = 5-methyl
  source 1..18: mol_type = other DNA
agtcggtaagttctgtcc

SEQ ID NO: 13696 - DNA, 18 bp, synthetic construct
  misc_feature 1..18: note = Description of Artificial Sequence: Synthetic Antisense oligonucleotide
  modified_base 1: mod_base = OTHER; note = bicyclic nucleic acid (BNA)
  modified_base 5: mod_base = OTHER; note = bicyclic nucleic acid (BNA)
  modified_base 13: mod_base = OTHER; note = bicyclic nucleic acid (BNA)
  modified_base 18: mod_base = OTHER; note = bicyclic nucleic acid (BNA)
  modified_base 4: mod_base = OTHER; note = 5-methyl
  modified_base 13: mod_base = OTHER; note = 5-methyl
  modified_base 17..18: mod_base = OTHER; note = 5-methyl
  source 1..18: mol_type = other DNA
agtcggtaagttctgtcc

SEQ ID NO: 13697 - DNA, 18 bp, synthetic construct
  misc_feature 1..18: note = Description of Artificial Sequence: Synthetic Antisense oligonucleotide
  modified_base 1: mod_base = OTHER; note = bicyclic nucleic acid (BNA)
  modified_base 13: mod_base = OTHER; note = bicyclic nucleic acid (BNA)
  modified_base 17..18: mod_base = OTHER; note = bicyclic nucleic acid (BNA)
  modified_base 4: mod_base = OTHER; note = 5-methyl
  modified_base 13: mod_base = OTHER; note = 5-methyl
  modified_base 17..18: mod_base = OTHER; note = 5-methyl
  source 1..18: mol_type = other DNA
agtcggtaagttctgtcc

SEQ ID NO: 13698 - DNA, 18 bp, synthetic construct
  misc_feature 1..18: note = Description of Artificial Sequence: Synthetic Antisense oligonucleotide
  modified_base 1: mod_base = OTHER; note = bicyclic nucleic acid (BNA)
  modified_base 4: mod_base = OTHER; note = bicyclic nucleic acid (BNA)
  modified_base 15: mod_base = OTHER; note = bicyclic nucleic acid (BNA)
  modified_base 18: mod_base = OTHER; note = bicyclic nucleic acid (BNA)
  modified_base 4: mod_base = OTHER; note = 5-methyl
  modified_base 13: mod_base = OTHER; note = 5-methyl
  modified_base 17..18: mod_base = OTHER; note = 5-methyl
  source 1..18: mol_type = other DNA
agtcggtaagttctgtcc

SEQ ID NO: 13699 - DNA, 18 bp, synthetic construct
  misc_feature 1..18: note = Description of Artificial Sequence: Synthetic Antisense oligonucleotide
  modified_base 1: mod_base = OTHER; note = bicyclic nucleic acid (BNA)
  modified_base 5: mod_base = OTHER; note = bicyclic nucleic acid (BNA)
  modified_base 10: mod_base = OTHER; note = bicyclic nucleic acid (BNA)
  modified_base 18: mod_base = OTHER; note = bicyclic nucleic acid (BNA)
  modified_base 4: mod_base = OTHER; note = 5-methyl
  modified_base 13: mod_base = OTHER; note = 5-methyl
  modified_base 17..18: mod_base = OTHER; note = 5-methyl
  source 1..18: mol_type = other DNA
agtcggtaagttctgtcc

SEQ ID NO: 13700 - DNA, 18 bp, synthetic construct
  misc_feature 1..18: note = Description of Artificial Sequence: Synthetic Antisense oligonucleotide
  modified_base 1..2: mod_base = OTHER; note = bicyclic nucleic acid (BNA)
  modified_base 17..18: mod_base = OTHER; note = bicyclic nucleic acid (BNA)
  modified_base 4: mod_base = OTHER; note = 5-methyl
  modified_base 13: mod_base = OTHER; note = 5-methyl
  modified_base 17..18: mod_base = OTHER; note = 5-methyl
  source 1..18: mol_type = other DNA
agtcggtaagttctgtcc

SEQ ID NO: 13701 - DNA, 18 bp, synthetic construct
  misc_feature 1..18: note = Description of Artificial Sequence: Synthetic Antisense oligonucleotide
  modified_base 1: mod_base = OTHER; note = bicyclic nucleic acid (BNA)
  modified_base 6: mod_base = OTHER; note = bicyclic nucleic acid (BNA)
  modified_base 13: mod_base = OTHER; note = bicyclic nucleic acid (BNA)
  modified_base 18: mod_base = OTHER; note = bicyclic nucleic acid (BNA)
  modified_base 4: mod_base = OTHER; note = 5-methyl
  modified_base 13: mod_base = OTHER; note = 5-methyl
  modified_base 17..18: mod_base = OTHER; note = 5-methyl
  source 1..18: mol_type = other DNA
agtcggtaagttctgtcc

SEQ ID NO: 13702 - DNA, 18 bp, synthetic construct
  misc_feature 1..18: note = Description of Artificial Sequence: Synthetic Antisense oligonucleotide
  modified_base 1..2: mod_base = OTHER; note = bicyclic nucleic acid (BNA)
  modified_base 15: mod_base = OTHER; note = bicyclic nucleic acid (BNA)
  modified_base 18: mod_base = OTHER; note = bicyclic nucleic acid (BNA)
  modified_base 4: mod_base = OTHER; note = 5-methyl
  modified_base 13: mod_base = OTHER; note = 5-methyl
  modified_base 17..18: mod_base = OTHER; note = 5-methyl
  source 1..18: mol_type = other DNA
agtcggtaagttctgtcc

SEQ ID NO: 13703 - DNA, 18 bp, synthetic construct
  misc_feature 1..18: note = Description of Artificial Sequence: Synthetic Antisense oligonucleotide
  modified_base 1..2: mod_base = OTHER; note = bicyclic nucleic acid (BNA)
  modified_base 6: mod_base = OTHER; note = bicyclic nucleic acid (BNA)
  modified_base 18: mod_base = OTHER; note = bicyclic nucleic acid (BNA)
  modified_base 4: mod_base = OTHER; note = 5-methyl
  modified_base 13: mod_base = OTHER; note = 5-methyl
  modified_base 17..18: mod_base = OTHER; note = 5-methyl
  source 1..18: mol_type = other DNA
agtcggtaagttctgtcc

SEQ ID NO: 13704 - DNA, 18 bp, synthetic construct
  misc_feature 1..18: note = Description of Artificial Sequence: Synthetic Antisense oligonucleotide
  modified_base 1: mod_base = OTHER; note = bicyclic nucleic acid (BNA)
  modified_base 4: mod_base = OTHER; note = bicyclic nucleic acid (BNA)
  modified_base 17..18: mod_base = OTHER; note = bicyclic nucleic acid (BNA)
  modified_base 4: mod_base = OTHER; note = 5-methyl
  modified_base 13: mod_base = OTHER; note = 5-methyl
  modified_base 17..18: mod_base = OTHER; note = 5-methyl
  source 1..18: mol_type = other DNA
agtcggtaagttctgtcc

SEQ ID NO: 13705 - DNA, 18 bp, synthetic construct
  misc_feature 1..18: note = Description of Artificial Sequence: Synthetic Antisense oligonucleotide
  modified_base 1: mod_base = OTHER; note = bicyclic nucleic acid (BNA)
  modified_base 10: mod_base = OTHER; note = bicyclic nucleic acid (BNA)
  modified_base 15: mod_base = OTHER; note = bicyclic nucleic acid (BNA)
  modified_base 18: mod_base = OTHER; note = bicyclic nucleic acid (BNA)
  modified_base 4: mod_base = OTHER; note = 5-methyl
  modified_base 13: mod_base = OTHER; note = 5-methyl
  modified_base 17..18: mod_base = OTHER; note = 5-methyl
  source 1..18: mol_type = other DNA
agtcggtaagttctgtcc

SEQ ID NO: 13706 - DNA, 18 bp, synthetic construct
  misc_feature 1..18: note = Description of Artificial Sequence: Synthetic Antisense oligonucleotide
  modified_base 1: mod_base = OTHER; note = bicyclic nucleic acid (BNA)
  modified_base 13: mod_base = OTHER; note = bicyclic nucleic acid (BNA)
  modified_base 15: mod_base = OTHER; note = bicyclic nucleic acid (BNA)
  modified_base 18: mod_base = OTHER; note = bicyclic nucleic acid (BNA)
  modified_base 4: mod_base = OTHER; note = 5-methyl
  modified_base 13: mod_base = OTHER; note = 5-methyl
  modified_base 17..18: mod_base = OTHER; note = 5-methyl
  source 1..18: mol_type = other DNA
agtcggtaagttctgtcc

SEQ ID NO: 13707 - DNA, 18 bp, synthetic construct
  misc_feature 1..18: note = Description of Artificial Sequence: Synthetic Antisense oligonucleotide
  modified_base 1: mod_base = OTHER; note = bicyclic nucleic acid (BNA)
  modified_base 5..6: mod_base = OTHER; note = bicyclic nucleic acid (BNA)
  modified_base 18: mod_base = OTHER; note = bicyclic nucleic acid (BNA)
  modified_base 4: mod_base = OTHER; note = 5-methyl
  modified_base 13: mod_base = OTHER; note = 5-methyl
  modified_base 17..18: mod_base = OTHER; note = 5-methyl
  source 1..18: mol_type = other DNA
agtcggtaagttctgtcc

SEQ ID NO: 13708 - DNA, 18 bp, synthetic construct
  misc_feature 1..18: note = Description of Artificial Sequence: Synthetic Antisense oligonucleotide
  modified_base 1: mod_base = OTHER; note = bicyclic nucleic acid (BNA)
  modified_base 5: mod_base = OTHER; note = bicyclic nucleic acid (BNA)
  modified_base 15: mod_base = OTHER; note = bicyclic nucleic acid (BNA)
  modified_base 18: mod_base = OTHER; note = bicyclic nucleic acid (BNA)
  modified_base 4: mod_base = OTHER; note = 5-methyl
  modified_base 13: mod_base = OTHER; note = 5-methyl
  modified_base 17..18: mod_base = OTHER; note = 5-methyl
  source 1..18: mol_type = other DNA
agtcggtaagttctgtcc

SEQ ID NO: 13709 - DNA, 18 bp, synthetic construct
  misc_feature 1..18: note = Description of Artificial Sequence: Synthetic Antisense oligonucleotide
  modified_base 1..2: mod_base = OTHER; note = bicyclic nucleic acid (BNA)
  modified_base 5: mod_base = OTHER; note = bicyclic nucleic acid (BNA)
  modified_base 18: mod_base = OTHER; note = bicyclic nucleic acid (BNA)
  modified_base 4: mod_base = OTHER; note = 5-methyl
  modified_base 13: mod_base = OTHER; note = 5-methyl
  modified_base 17..18: mod_base = OTHER; note = 5-methyl
  source 1..18: mol_type = other DNA
agtcggtaagttctgtcc

SEQ ID NO: 13710 - DNA, 18 bp, synthetic construct
  misc_feature 1..18: note = Description of Artificial Sequence: Synthetic Antisense oligonucleotide
  modified_base 1: mod_base = OTHER; note = bicyclic nucleic acid (BNA)
  modified_base 5: mod_base = OTHER; note = bicyclic nucleic acid (BNA)
  modified_base 17..18: mod_base = OTHER; note = bicyclic nucleic acid (BNA)
  modified_base 4: mod_base = OTHER; note = 5-methyl
  modified_base 13: mod_base = OTHER; note = 5-methyl
  modified_base 17..18: mod_base = OTHER; note = 5-methyl
  source 1..18: mol_type = other DNA
agtcggtaagttctgtcc

SEQ ID NO: 13711 - DNA, 18 bp, synthetic construct
  misc_feature 1..18: note = Description of Artificial Sequence: Synthetic Antisense oligonucleotide
  modified_base 1: mod_base = OTHER; note = bicyclic nucleic acid (BNA)
  modified_base 10: mod_base = OTHER; note = bicyclic nucleic acid (BNA)
  modified_base 17..18: mod_base = OTHER; note = bicyclic nucleic acid (BNA)
  modified_base 4: mod_base = OTHER; note = 5-methyl
  modified_base 13: mod_base = OTHER; note = 5-methyl
  modified_base 17..18: mod_base = OTHER; note = 5-methyl
  source 1..18: mol_type = other DNA
agtcggtaagttctgtcc

SEQ ID NO: 13712 - DNA, 18 bp, synthetic construct
  misc_feature 1..18: note = Description of Artificial Sequence: Synthetic Antisense oligonucleotide
  modified_base 1: mod_base = OTHER; note = bicyclic nucleic acid (BNA)
  modified_base 4: mod_base = OTHER; note = bicyclic nucleic acid (BNA)
  modified_base 10: mod_base = OTHER; note = bicyclic nucleic acid (BNA)
  modified_base 18: mod_base = OTHER; note = bicyclic nucleic acid (BNA)
  modified_base 4: mod_base = OTHER; note = 5-methyl
  modified_base 13: mod_base = OTHER; note = 5-methyl
  modified_base 17..18: mod_base = OTHER; note = 5-methyl
  source 1..18: mol_type = other DNA
agtcggtaagttctgtcc

SEQ ID NO: 13713 - DNA, 18 bp, synthetic construct
  misc_feature 1..18: note = Description of Artificial Sequence: Synthetic Antisense oligonucleotide
  modified_base 1..2: mod_base = OTHER; note = bicyclic nucleic acid (BNA)
  modified_base 10: mod_base = OTHER; note = bicyclic nucleic acid (BNA)
  modified_base 18: mod_base = OTHER; note = bicyclic nucleic acid (BNA)
  modified_base 4: mod_base = OTHER; note = 5-methyl
  modified_base 13: mod_base = OTHER; note = 5-methyl
  modified_base 17..18: mod_base = OTHER; note = 5-methyl
  source 1..18: mol_type = other DNA
agtcggtaagttctgtcc

SEQ ID NO: 13714 - DNA, 18 bp, synthetic construct
  misc_feature 1..18: note = Description of Artificial Sequence: Synthetic Antisense oligonucleotide
  modified_base 1: mod_base = OTHER; note = bicyclic nucleic acid (BNA)
  modified_base 4: mod_base = OTHER; note = bicyclic nucleic acid (BNA)
  modified_base 6: mod_base = OTHER; note = bicyclic nucleic acid (BNA)
  modified_base 18: mod_base = OTHER; note = bicyclic nucleic acid (BNA)
  modified_base 4: mod_base = OTHER; note = 5-methyl
  modified_base 13: mod_base = OTHER; note = 5-methyl
  modified_base 17..18: mod_base = OTHER; note = 5-methyl
  source 1..18: mol_type = other DNA
agtcggtaagttctgtcc

SEQ ID NO: 13715 - DNA, 18 bp, synthetic construct
  misc_feature 1..18: note = Description of Artificial Sequence: Synthetic Antisense oligonucleotide
  modified_base 1: mod_base = OTHER; note = bicyclic nucleic acid (BNA)
  modified_base 4: mod_base = OTHER; note = bicyclic nucleic acid (BNA)
  modified_base 13: mod_base = OTHER; note = bicyclic nucleic acid (BNA)
  modified_base 18: mod_base = OTHER; note = bicyclic nucleic acid (BNA)
  modified_base 4: mod_base = OTHER; note = 5-methyl
  modified_base 13: mod_base = OTHER; note = 5-methyl
  modified_base 17..18: mod_base = OTHER; note = 5-methyl
  source 1..18: mol_type = other DNA
agtcggtaagttctgtcc

SEQ ID NO: 13716 - DNA, 18 bp, synthetic construct
  misc_feature 1..18: note = Description of Artificial Sequence: Synthetic Antisense oligonucleotide
  modified_base 1: mod_base = OTHER; note = bicyclic nucleic acid (BNA)
  modified_base 15: mod_base = OTHER; note = bicyclic nucleic acid (BNA)
  modified_base 17..18: mod_base = OTHER; note = bicyclic nucleic acid (BNA)
  modified_base 4: mod_base = OTHER; note = 5-methyl
  modified_base 13: mod_base = OTHER; note = 5-methyl
  modified_base 17..18: mod_base = OTHER; note = 5-methyl
  source 1..18: mol_type = other DNA
agtcggtaagttctgtcc

SEQ ID NO: 13717 - DNA, 18 bp, synthetic construct
  misc_feature 1..18: note = Description of Artificial Sequence: Synthetic Antisense oligonucleotide
  modified_base 1..2: mod_base = OTHER; note = bicyclic nucleic acid (BNA)
  modified_base 13: mod_base = OTHER; note = bicyclic nucleic acid (BNA)
  modified_base 18: mod_base = OTHER; note = bicyclic nucleic acid (BNA)
  modified_base 4: mod_base = OTHER; note = 5-methyl
  modified_base 13: mod_base = OTHER; note = 5-methyl
  modified_base 17..18: mod_base = OTHER; note = 5-methyl
  source 1..18: mol_type = other DNA
agtcggtaagttctgtcc

SEQ ID NO: 13718 - DNA, 18 bp, synthetic construct
  misc_feature 1..18: note = Description of Artificial Sequence: Synthetic Antisense oligonucleotide
  modified_base 1: mod_base = OTHER; note = bicyclic nucleic acid (BNA)
  modified_base 6: mod_base = OTHER; note = bicyclic nucleic acid (BNA)
  modified_base 17..18: mod_base = OTHER; note = bicyclic nucleic acid (BNA)
  modified_base 4: mod_base = OTHER; note = 5-methyl
  modified_base 13: mod_base = OTHER; note = 5-methyl
  modified_base 17..18: mod_base = OTHER; note = 5-methyl
  source 1..18: mol_type = other DNA
agtcggtaagttctgtcc

SEQ ID NO: 13719 - DNA, 18 bp, synthetic construct
  misc_feature 1..18: note = Description of Artificial Sequence: Synthetic Antisense oligonucleotide
  modified_base 1: mod_base = OTHER; note = bicyclic nucleic acid (BNA)
  modified_base 6: mod_base = OTHER; note = bicyclic nucleic acid (BNA)
  modified_base 15: mod_base = OTHER; note = bicyclic nucleic acid (BNA)
  modified_base 18: mod_base = OTHER; note = bicyclic nucleic acid (BNA)
  modified_base 4: mod_base = OTHER; note = 5-methyl
  modified_base 13: mod_base = OTHER; note = 5-methyl
  modified_base 17..18: mod_base = OTHER; note = 5-methyl
  source 1..18: mol_type = other DNA
agtcggtaagttctgtcc

SEQ ID NO: 13720 - DNA, 18 bp, synthetic construct
  misc_feature 1..18: note = Description of Artificial Sequence: Synthetic Antisense oligonucleotide
  modified_base 1: mod_base = OTHER; note = bicyclic nucleic acid (BNA)
  modified_base 4..5: mod_base = OTHER; note = bicyclic nucleic acid (BNA)
  modified_base 18: mod_base = OTHER; note = bicyclic nucleic acid (BNA)
  modified_base 4: mod_base = OTHER; note = 5-methyl
  modified_base 13: mod_base = OTHER; note = 5-methyl
  modified_base 17..18: mod_base = OTHER; note = 5-methyl
  source 1..18: mol_type = other DNA
agtcggtaagttctgtcc

SEQ ID NO: 13721 - DNA, 18 bp, synthetic construct
  misc_feature 1..18: note = Description of Artificial Sequence: Synthetic Antisense oligonucleotide
  modified_base 1: mod_base = OTHER; note = bicyclic nucleic acid (BNA)
  modified_base 10: mod_base = OTHER; note = bicyclic nucleic acid (BNA)
  modified_base 13: mod_base = OTHER; note = bicyclic nucleic acid (BNA)
  modified_base 18: mod_base = OTHER; note = bicyclic nucleic acid (BNA)
  modified_base 4: mod_base = OTHER; note = 5-methyl
  modified_base 13: mod_base = OTHER; note = 5-methyl
  modified_base 17..18: mod_base = OTHER; note = 5-methyl
  source 1..18: mol_type = other DNA
agtcggtaagttctgtcc

SEQ ID NO: 13722 - DNA, 18 bp, synthetic construct
  misc_feature 1..18: note = Description of Artificial Sequence: Synthetic Antisense oligonucleotide
  modified_base 1: mod_base = OTHER; note = 5-methyl
  modified_base 5..6: mod_base = OTHER; note = 5-methyl
  modified_base 10..12: mod_base = OTHER; note = 5-methyl
  modified_base 1: mod_base = OTHER; note = bicyclic nucleic acid (BNA)
  modified_base 12: mod_base = OTHER; note = bicyclic nucleic acid (BNA)
  modified_base 17..18: mod_base = OTHER; note = bicyclic nucleic acid (BNA)
  source 1..18: mol_type = other DNA
ctgtccaagcccggttga

SEQ ID NO: 13723 - DNA, 18 bp, synthetic construct
  misc_feature 1..18: note = Description of Artificial Sequence: Synthetic Antisense oligonucleotide
  modified_base 1: mod_base = OTHER; note = 5-methyl
  modified_base 5..6: mod_base = OTHER; note = 5-methyl
  modified_base 10..12: mod_base = OTHER; note = 5-methyl
  modified_base 1: mod_base = OTHER; note = bicyclic nucleic acid (BNA)
  modified_base 6: mod_base = OTHER; note = bicyclic nucleic acid (BNA)
  modified_base 10: mod_base = OTHER; note = bicyclic nucleic acid (BNA)
  modified_base 18: mod_base = OTHER; note = bicyclic nucleic acid (BNA)
  source 1..18: mol_type = other DNA
ctgtccaagcccggttga

SEQ ID NO: 13724 - DNA, 18 bp, synthetic construct
  misc_feature 1..18: note = Description of Artificial Sequence: Synthetic Antisense oligonucleotide
  modified_base 1: mod_base = OTHER; note = 5-methyl
  modified_base 5..6: mod_base = OTHER; note = 5-methyl
  modified_base 10..12: mod_base = OTHER; note = 5-methyl
  modified_base 1: mod_base = OTHER; note = bicyclic nucleic acid (BNA)
  modified_base 9: mod_base = OTHER; note = bicyclic nucleic acid (BNA)
  modified_base 14: mod_base = OTHER; note = bicyclic nucleic acid (BNA)
  modified_base 18: mod_base = OTHER; note = bicyclic nucleic acid (BNA)
  source 1..18: mol_type = other DNA
ctgtccaagcccggttga

SEQ ID NO: 13725 - DNA, 18 bp, synthetic construct
  misc_feature 1..18: note = Description of Artificial Sequence: Synthetic Antisense oligonucleotide
  modified_base 1: mod_base = OTHER; note = 5-methyl
  modified_base 5..6: mod_base = OTHER; note = 5-methyl
  modified_base 10..12: mod_base = OTHER; note = 5-methyl
  modified_base 1: mod_base = OTHER; note = bicyclic nucleic acid (BNA)
  modified_base 11..12: mod_base = OTHER; note = bicyclic nucleic acid (BNA)
  modified_base 18: mod_base = OTHER; note = bicyclic nucleic acid (BNA)
  source 1..18: mol_type = other DNA
ctgtccaagcccggttga

SEQ ID NO: 13726 - DNA, 18 bp, synthetic construct
  misc_feature 1..18: note = Description of Artificial Sequence: Synthetic Antisense oligonucleotide
  modified_base 1: mod_base = OTHER; note = 5-methyl
  modified_base 5..6: mod_base = OTHER; note = 5-methyl
  modified_base 10..12: mod_base = OTHER; note = 5-methyl
  modified_base 1: mod_base = OTHER; note = bicyclic nucleic acid (BNA)
  modified_base 5: mod_base = OTHER; note = bicyclic nucleic acid (BNA)
  modified_base 9: mod_base = OTHER; note = bicyclic nucleic acid (BNA)
  modified_base 18: mod_base = OTHER; note = bicyclic nucleic acid (BNA)
  source 1..18: mol_type = other DNA
ctgtccaagcccggttga

SEQ ID NO: 13727 - DNA, 18 bp, synthetic construct
  misc_feature 1..18: note = Description of Artificial Sequence: Synthetic Antisense oligonucleotide
  modified_base 1: mod_base = OTHER; note = 5-methyl
  modified_base 5..6: mod_base = OTHER; note = 5-methyl
  modified_base 10..12: mod_base = OTHER; note = 5-methyl
  modified_base 1: mod_base = OTHER; note = bicyclic nucleic acid (BNA)
  modified_base 3: mod_base = OTHER; note = bicyclic nucleic acid (BNA)
  modified_base 9: mod_base = OTHER; note = bicyclic nucleic acid (BNA)
  modified_base 18: mod_base = OTHER; note = bicyclic nucleic acid (BNA)
  source 1..18: mol_type = other DNA
ctgtccaagcccggttga

SEQ ID NO: 13728 - DNA, 18 bp, synthetic construct
  misc_feature 1..18: note = Description of Artificial Sequence: Synthetic Antisense oligonucleotide
  modified_base 1: mod_base = OTHER; note = 5-methyl
  modified_base 5..6: mod_base = OTHER; note = 5-methyl
  modified_base 10..12: mod_base = OTHER; note = 5-methyl
  modified_base 1: mod_base = OTHER; note = bicyclic nucleic acid (BNA)
  modified_base 6: mod_base = OTHER; note = bicyclic nucleic acid (BNA)
  modified_base 14: mod_base = OTHER; note = bicyclic nucleic acid (BNA)
  modified_base 18: mod_base = OTHER; note = bicyclic nucleic acid (BNA)
  source 1..18: mol_type = other DNA
ctgtccaagcccggttga

SEQ ID NO: 13729 - DNA, 18 bp, synthetic construct
  misc_feature 1..18: note = Description of Artificial Sequence: Synthetic Antisense oligonucleotide
  modified_base 1: mod_base = OTHER; note = 5-methyl
  modified_base 5..6: mod_base = OTHER; note = 5-methyl
  modified_base 10..12: mod_base = OTHER; note = 5-methyl
  modified_base 1: mod_base = OTHER; note = bicyclic nucleic acid (BNA)
  modified_base 9..10: mod_base = OTHER; note = bicyclic nucleic acid (BNA)
  modified_base 18: mod_base = OTHER; note = bicyclic nucleic acid (BNA)
  source 1..18: mol_type = other DNA
ctgtccaagcccggttga

SEQ ID NO: 13730 - DNA, 18 bp, synthetic construct
  misc_feature 1..18: note = Description of Artificial Sequence: Synthetic Antisense oligonucleotide
  modified_base 1: mod_base = OTHER; note = 5-methyl
  modified_base 5..6: mod_base = OTHER; note = 5-methyl
  modified_base 10..12: mod_base = OTHER; note = 5-methyl
  modified_base 1: mod_base = OTHER; note = bicyclic nucleic acid (BNA)
  modified_base 5: mod_base = OTHER; note = bicyclic nucleic acid (BNA)
  modified_base 13: mod_base = OTHER; note = bicyclic nucleic acid (BNA)
  modified_base 18: mod_base = OTHER; note = bicyclic nucleic acid (BNA)
  source 1..18: mol_type = other DNA
ctgtccaagcccggttga

SEQ ID NO: 13731 - DNA, 18 bp, synthetic construct
  misc_feature 1..18: note = Description of Artificial Sequence: Synthetic Antisense oligonucleotide
  modified_base 1: mod_base = OTHER; note = 5-methyl
  modified_base 5..6: mod_base = OTHER; note = 5-methyl
  modified_base 10..12: mod_base = OTHER; note = 5-methyl
  modified_base 1: mod_base = OTHER; note = bicyclic nucleic acid (BNA)
  modified_base 3: mod_base = OTHER; note = bicyclic nucleic acid (BNA)
  modified_base 13: mod_base = OTHER; note = bicyclic nucleic acid (BNA)
  modified_base 18: mod_base = OTHER; note = bicyclic nucleic acid (BNA)
  source 1..18: mol_type = other DNA
ctgtccaagcccggttga

SEQ ID NO: 13732 - DNA, 18 bp, synthetic construct
  misc_feature 1..18: note = Description of Artificial Sequence: Synthetic Antisense oligonucleotide
  modified_base 1: mod_base = OTHER; note = 5-methyl
  modified_base 5..6: mod_base = OTHER; note = 5-methyl
  modified_base 10..12: mod_base = OTHER; note = 5-methyl
  modified_base 1: mod_base = OTHER; note = bicyclic nucleic acid (BNA)
  modified_base 13: mod_base = OTHER; note = bicyclic nucleic acid (BNA)
  modified_base 17..18: mod_base = OTHER; note = bicyclic nucleic acid (BNA)
  source 1..18: mol_type = other DNA
ctgtccaagcccggttga

SEQ ID NO: 13733 - DNA, 18 bp, synthetic construct
  misc_feature 1..18: note = Description of Artificial Sequence: Synthetic Antisense oligonucleotide
  modified_base 1: mod_base = OTHER; note = 5-methyl
  modified_base 5..6: mod_base = OTHER; note = 5-methyl
  modified_base 10..12: mod_base = OTHER; note = 5-methyl
  modified_base 1: mod_base = OTHER; note = bicyclic nucleic acid (BNA)
  modified_base 3: mod_base = OTHER; note = bicyclic nucleic acid (BNA)
  modified_base 6: mod_base = OTHER; note = bicyclic nucleic acid (BNA)
  modified_base 18: mod_base = OTHER; note = bicyclic nucleic acid (BNA)
  source 1..18: mol_type = other DNA
ctgtccaagcccggttga

SEQ ID NO: 13734 - DNA, 18 bp, synthetic construct
  misc_feature 1..18: note = Description of Artificial Sequence: Synthetic Antisense oligonucleotide
  modified_base 1: mod_base = OTHER; note = 5-methyl
  modified_base 5..6: mod_base = OTHER; note = 5-methyl
  modified_base 10..12: mod_base = OTHER; note = 5-methyl
  modified_base 1: mod_base = OTHER; note = bicyclic nucleic acid (BNA)
  modified_base 6: mod_base = OTHER; note = bicyclic nucleic acid (BNA)
  modified_base 9: mod_base = OTHER; note = bicyclic nucleic acid (BNA)
  modified_base 18: mod_base = OTHER; note = bicyclic nucleic acid (BNA)
  source 1..18: mol_type = other DNA
ctgtccaagcccggttga

SEQ ID NO: 13735 - DNA, 18 bp, synthetic construct
  misc_feature 1..18: note = Description of Artificial Sequence: Synthetic Antisense oligonucleotide
  modified_base 1: mod_base = OTHER; note = 5-methyl
  modified_base 5..6: mod_base = OTHER; note = 5-methyl
  modified_base 10..12: mod_base = OTHER; note = 5-methyl
  modified_base 1: mod_base = OTHER; note = bicyclic nucleic acid (BNA)
  modified_base 5: mod_base = OTHER; note = bicyclic nucleic acid (BNA)
  modified_base 10: mod_base = OTHER; note = bicyclic nucleic acid (BNA)
  modified_base 18: mod_base = OTHER; note = bicyclic nucleic acid (BNA)
  source 1..18: mol_type = other DNA
ctgtccaagcccggttga

SEQ ID NO: 13736 - DNA, 18 bp, synthetic construct
  misc_feature 1..18: note = Description of Artificial Sequence: Synthetic Antisense oligonucleotide
  modified_base 1: mod_base = OTHER; note = 5-methyl
  modified_base 5..6: mod_base = OTHER; note = 5-methyl
  modified_base 10..12: mod_base = OTHER; note = 5-methyl
  modified_base 1: mod_base = OTHER; note = bicyclic nucleic acid (BNA)
  modified_base 3: mod_base = OTHER; note = bicyclic nucleic acid (BNA)
  modified_base 10: mod_base = OTHER; note = bicyclic nucleic acid (BNA)
  modified_base 18: mod_base = OTHER; note = bicyclic nucleic acid (BNA)
  source 1..18: mol_type = other DNA
ctgtccaagcccggttga

SEQ ID NO: 13737 - DNA, 18 bp, synthetic construct
  misc_feature 1..18: note = Description of Artificial Sequence: Synthetic Antisense oligonucleotide
  modified_base 1: mod_base = OTHER; note = 5-methyl
  modified_base 5..6: mod_base = OTHER; note = 5-methyl
  modified_base 10..12: mod_base = OTHER; note = 5-methyl
  modified_base 1: mod_base = OTHER; note = bicyclic nucleic acid (BNA)
  modified_base 13..14: mod_base = OTHER; note = bicyclic nucleic acid (BNA)
  modified_base 18: mod_base = OTHER; note = bicyclic nucleic acid (BNA)
  source 1..18: mol_type = other DNA
ctgtccaagcccggttga

SEQ ID NO: 13738 - DNA, 18 bp, synthetic construct
  misc_feature 1..18: note = Description of Artificial Sequence: Synthetic Antisense oligonucleotide
  modified_base 1: mod_base = OTHER; note = 5-methyl
  modified_base 5..6: mod_base = OTHER; note = 5-methyl
  modified_base 10..12: mod_base = OTHER; note = 5-methyl
  modified_base 1: mod_base = OTHER; note = bicyclic nucleic acid (BNA)
  modified_base 6: mod_base = OTHER; note = bicyclic nucleic acid (BNA)
  modified_base 13: mod_base = OTHER; note = bicyclic nucleic acid (BNA)
  modified_base 18: mod_base = OTHER; note = bicyclic nucleic acid (BNA)
  source 1..18: mol_type = other DNA
ctgtccaagcccggttga

SEQ ID NO: 13739 - DNA, 18 bp, synthetic construct
  misc_feature 1..18: note = Description of Artificial Sequence: Synthetic Antisense oligonucleotide
  modified_base 1: mod_base = OTHER; note = 5-methyl
  modified_base 5..6: mod_base = OTHER; note = 5-methyl
  modified_base 10..12: mod_base = OTHER; note = 5-methyl
  modified_base 1: mod_base = OTHER; note = bicyclic nucleic acid (BNA)
  modified_base 9: mod_base = OTHER; note = bicyclic nucleic acid (BNA)
  modified_base 11: mod_base = OTHER; note = bicyclic nucleic acid (BNA)
  modified_base 18: mod_base = OTHER; note = bicyclic nucleic acid (BNA)
  source 1..18: mol_type = other DNA
ctgtccaagcccggttga

SEQ ID NO: 13740 - DNA, 18 bp, synthetic construct
  misc_feature 1..18: note = Description of Artificial Sequence: Synthetic Antisense oligonucleotide
  modified_base 1: mod_base = OTHER; note = 5-methyl
  modified_base 5..6: mod_base = OTHER; note = 5-methyl
  modified_base 10..12: mod_base = OTHER; note = 5-methyl
  modified_base 1: mod_base = OTHER; note = bicyclic nucleic acid (BNA)
  modified_base 14: mod_base = OTHER; note = bicyclic nucleic acid (BNA)
  modified_base 17..18: mod_base = OTHER; note = bicyclic nucleic acid (BNA)
  source 1..18: mol_type = other DNA
ctgtccaagcccggttga

SEQ ID NO: 13741 - DNA, 18 bp, synthetic construct
  misc_feature 1..18: note = Description of Artificial Sequence: Synthetic Antisense oligonucleotide
  modified_base 1: mod_base = OTHER; note = 5-methyl
  modified_base 5..6: mod_base = OTHER; note = 5-methyl
  modified_base 10..12: mod_base = OTHER; note = 5-methyl
  modified_base 1: mod_base = OTHER; note = bicyclic nucleic acid (BNA)
  modified_base 11: mod_base = OTHER; note = bicyclic nucleic acid (BNA)
  modified_base 13: mod_base = OTHER; note = bicyclic nucleic acid (BNA)
  modified_base 18: mod_base = OTHER; note = bicyclic nucleic acid (BNA)
  source 1..18: mol_type = other DNA
ctgtccaagcccggttga

SEQ ID NO: 13742 - DNA, 18 bp, synthetic construct
  misc_feature 1..18: note = Description of Artificial Sequence: Synthetic Antisense oligonucleotide
  modified_base 1: mod_base = OTHER; note = 5-methyl
  modified_base 5..6: mod_base = OTHER; note = 5-methyl
  modified_base 10..12: mod_base = OTHER; note = 5-methyl
  modified_base 1: mod_base = OTHER; note = bicyclic nucleic acid (BNA)
  modified_base 5: mod_base = OTHER; note = bicyclic nucleic acid (BNA)
  modified_base 14: mod_base = OTHER; note = bicyclic nucleic acid (BNA)
  modified_base 18: mod_base = OTHER; note = bicyclic nucleic acid (BNA)
  source 1..18: mol_type = other DNA
ctgtccaagcccggttga

SEQ ID NO: 13743 - DNA, 18 bp, synthetic construct
  misc_feature 1..18: note = Description of Artificial Sequence: Synthetic Antisense oligonucleotide
  modified_base 1: mod_base = OTHER; note = 5-methyl
  modified_base 5..6: mod_base = OTHER; note = 5-methyl
  modified_base 10..12: mod_base = OTHER; note = 5-methyl
  modified_base 1: mod_base = OTHER; note = bicyclic nucleic acid (BNA)
  modified_base 3: mod_base = OTHER; note = bicyclic nucleic acid (BNA)
  modified_base 14: mod_base = OTHER; note = bicyclic nucleic acid (BNA)
  modified_base 18: mod_base = OTHER; note = bicyclic nucleic acid (BNA)
  source 1..18: mol_type = other DNA
ctgtccaagcccggttga

SEQ ID NO: 13744 - DNA, 18 bp, synthetic construct
  misc_feature 1..18: note = Description of Artificial Sequence: Synthetic Antisense oligonucleotide
  modified_base 1: mod_base = OTHER; note = 5-methyl
  modified_base 5..6: mod_base = OTHER; note = 5-methyl
  modified_base 10..12: mod_base = OTHER; note = 5-methyl
  modified_base 1: mod_base = OTHER; note = bicyclic nucleic acid (BNA)
  modified_base 10: mod_base = OTHER; note = bicyclic nucleic acid (BNA)
  modified_base 12: mod_base = OTHER; note = bicyclic nucleic acid (BNA)
  modified_base 18: mod_base = OTHER; note = bicyclic nucleic acid (BNA)
  source 1..18: mol_type = other DNA
ctgtccaagcccggttga

SEQ ID NO: 13745 - DNA, 18 bp, synthetic construct
  misc_feature 1..18: note = Description of Artificial Sequence: Synthetic Antisense oligonucleotide
  modified_base 1: mod_base = OTHER; note = 5-methyl
  modified_base 5..6: mod_base = OTHER; note = 5-methyl
  modified_base 10..12: mod_base = OTHER; note = 5-methyl
  modified_base 1: mod_base = OTHER; note = bicyclic nucleic acid (BNA)
  modified_base 9: mod_base = OTHER; note = bicyclic nucleic acid (BNA)
  modified_base 17..18: mod_base = OTHER; note = bicyclic nucleic acid (BNA)
  source 1..18: mol_type = other DNA
ctgtccaagcccggttga

SEQ ID NO: 13746 - DNA, 18 bp, synthetic construct
  misc_feature 1..18: note = Description of Artificial Sequence: Synthetic Antisense oligonucleotide
  modified_base 1: mod_base = OTHER; note = 5-methyl
  modified_base 5..6: mod_base = OTHER; note = 5-methyl
  modified_base 10..12: mod_base = OTHER; note = 5-methyl
  modified_base 1: mod_base = OTHER; note = bicyclic nucleic acid (BNA)
  modified_base 12: mod_base = OTHER; note = bicyclic nucleic acid (BNA)
  modified_base 14: mod_base = OTHER; note = bicyclic nucleic acid (BNA)
  modified_base 18: mod_base = OTHER; note = bicyclic nucleic acid (BNA)
  source 1..18: mol_type = other DNA
ctgtccaagcccggttga

SEQ ID NO: 13747 - DNA, 18 bp, synthetic construct
  misc_feature 1..18: note = Description of Artificial Sequence: Synthetic Antisense oligonucleotide
  modified_base 1: mod_base = OTHER; note = 5-methyl
  modified_base 5..6: mod_base = OTHER; note = 5-methyl
  modified_base 10..12: mod_base = OTHER; note = 5-methyl
  modified_base 1: mod_base = OTHER; note = bicyclic nucleic acid (BNA)
  modified_base 5: mod_base = OTHER; note = bicyclic nucleic acid (BNA)
  modified_base 11: mod_base = OTHER; note = bicyclic nucleic acid (BNA)
  modified_base 18: mod_base = OTHER; note = bicyclic nucleic acid (BNA)
  source 1..18: mol_type = other DNA
ctgtccaagcccggttga

SEQ ID NO: 13748 - DNA, 18 bp, synthetic construct
  misc_feature 1..18: note = Description of Artificial Sequence: Synthetic Antisense oligonucleotide
  modified_base 1: mod_base = OTHER; note = 5-methyl
  modified_base 5..6: mod_base = OTHER; note = 5-methyl
  modified_base 10..12: mod_base = OTHER; note = 5-methyl
  modified_base 1: mod_base = OTHER; note = bicyclic nucleic acid (BNA)
  modified_base 3: mod_base = OTHER; note = bicyclic nucleic acid (BNA)
  modified_base 17..18: mod_base = OTHER; note = bicyclic nucleic acid (BNA)
  source 1..18: mol_type = other DNA
ctgtccaagcccggttga

SEQ ID NO: 13749 - DNA, 18 bp, synthetic construct
  misc_feature 1..18: note = Description of Artificial Sequence: Synthetic Antisense oligonucleotide
  modified_base 1: mod_base = OTHER; note = 5-methyl
  modified_base 5..6: mod_base = OTHER; note = 5-methyl
  modified_base 10..12: mod_base = OTHER; note = 5-methyl
  modified_base 1: mod_base = OTHER; note = bicyclic nucleic acid (BNA)
  modified_base 6: mod_base = OTHER; note = bicyclic nucleic acid (BNA)
  modified_base 12: mod_base = OTHER; note = bicyclic nucleic acid (BNA)
  modified_base 18: mod_base = OTHER; note = bicyclic nucleic acid (BNA)
  source 1..18: mol_type = other DNA
ctgtccaagcccggttga

SEQ ID NO: 13750 - DNA, 18 bp, synthetic construct
  misc_feature 1..18: note = Description of Artificial Sequence: Synthetic Antisense oligonucleotide
  modified_base 1: mod_base = OTHER; note = 5-methyl
  modified_base 5..6: mod_base = OTHER; note = 5-methyl
  modified_base 10..12: mod_base = OTHER; note = 5-methyl
  modified_base 1: mod_base = OTHER; note = bicyclic nucleic acid (BNA)
  modified_base 5..6: mod_base = OTHER; note = bicyclic nucleic acid (BNA)
  modified_base 18: mod_base = OTHER; note = bicyclic nucleic acid (BNA)
  source 1..18: mol_type = other DNA
ctgtccaagcccggttga

SEQ ID NO: 13751 - DNA, 18 bp, synthetic construct
  misc_feature 1..18: note = Description of Artificial Sequence: Synthetic Antisense oligonucleotide
  modified_base 1: mod_base = OTHER; note = 5-methyl
  modified_base 5..6: mod_base = OTHER; note = 5-methyl
  modified_base 10..12: mod_base = OTHER; note = 5-methyl
  modified_base 1: mod_base = OTHER; note = bicyclic nucleic acid (BNA)
  modified_base 11: mod_base = OTHER; note = bicyclic nucleic acid (BNA)
  modified_base 14: mod_base = OTHER; note = bicyclic nucleic acid (BNA)
  modified_base 18: mod_base = OTHER; note = bicyclic nucleic acid (BNA)
  source 1..18: mol_type = other DNA
ctgtccaagcccggttga

SEQ ID NO: 13752 - DNA, 18 bp, synthetic construct
  misc_feature 1..18: note = Description of Artificial Sequence: Synthetic Antisense oligonucleotide
  modified_base 1: mod_base = OTHER; note = 5-methyl
  modified_base 5..6: mod_base = OTHER; note = 5-methyl
  modified_base 10..12: mod_base = OTHER; note = 5-methyl
  modified_base 1: mod_base = OTHER; note = bicyclic nucleic acid (BNA)
  modified_base 9: mod_base = OTHER; note = bicyclic nucleic acid (BNA)
  modified_base 12: mod_base = OTHER; note = bicyclic nucleic acid (BNA)
  modified_base 18: mod_base = OTHER; note = bicyclic nucleic acid (BNA)
  source 1..18: mol_type = other DNA
ctgtccaagcccggttga

SEQ ID NO: 13753 - DNA, 18 bp, synthetic construct
  misc_feature 1..18: note = Description of Artificial Sequence: Synthetic Antisense oligonucleotide
  modified_base 1: mod_base = OTHER; note = 5-methyl
  modified_base 5..6: mod_base = OTHER; note = 5-methyl
  modified_base 10..12: mod_base = OTHER; note = 5-methyl
  modified_base 1: mod_base = OTHER; note = bicyclic nucleic acid (BNA)
  modified_base 5: mod_base = OTHER; note = bicyclic nucleic acid (BNA)
  modified_base 17..18: mod_base = OTHER; note = bicyclic nucleic acid (BNA)
  source 1..18: mol_type = other DNA
ctgtccaagcccggttga

SEQ ID NO: 13754 - DNA, 18 bp, synthetic construct
  misc_feature 1..18: note = Description of Artificial Sequence: Synthetic Antisense oligonucleotide
  modified_base 1: mod_base = OTHER; note = 5-methyl
  modified_base 5..6: mod_base = OTHER; note = 5-methyl
  modified_base 10..12: mod_base = OTHER; note = 5-methyl
  modified_base 1: mod_base = OTHER; note = bicyclic nucleic acid (BNA)
  modified_base 3: mod_base = OTHER; note = bicyclic nucleic acid (BNA)
  modified_base 11: mod_base = OTHER; note = bicyclic nucleic acid (BNA)
  modified_base 18: mod_base = OTHER; note = bicyclic nucleic acid (BNA)
  source 1..18: mol_type = other DNA
ctgtccaagcccggttga

SEQ ID NO: 13755 - DNA, 18 bp, synthetic construct
  misc_feature 1..18: note = Description of Artificial Sequence: Synthetic Antisense oligonucleotide
  modified_base 1: mod_base = OTHER; note = 5-methyl
  modified_base 5..6: mod_base = OTHER; note = 5-methyl
  modified_base 10..12: mod_base = OTHER; note = 5-methyl
  modified_base 1: mod_base = OTHER; note = bicyclic nucleic acid (BNA)
  modified_base 10..11: mod_base = OTHER; note = bicyclic nucleic acid (BNA)
  modified_base 18: mod_base = OTHER; note = bicyclic nucleic acid (BNA)
  source 1..18: mol_type = other DNA
ctgtccaagcccggttga

SEQ ID NO: 13756 - DNA, 18 bp, synthetic construct
  misc_feature 1..18: note = Description of Artificial Sequence: Synthetic Antisense oligonucleotide
  modified_base 1: mod_base = OTHER; note = 5-methyl
  modified_base 5..6: mod_base = OTHER; note = 5-methyl
  modified_base 10..12: mod_base = OTHER; note = 5-methyl
  modified_base 1: mod_base = OTHER; note = bicyclic nucleic acid (BNA)
  modified_base 10: mod_base = OTHER; note = bicyclic nucleic acid (BNA)
  modified_base 17..18: mod_base = OTHER; note = bicyclic nucleic acid (BNA)
  source 1..18: mol_type = other DNA
ctgtccaagcccggttga

SEQ ID NO: 13757 - DNA, 18 bp, synthetic construct
  misc_feature 1..18: note = Description of Artificial Sequence: Synthetic Antisense oligonucleotide
  modified_base 1: mod_base = OTHER; note = 5-methyl
  modified_base 5..6: mod_base = OTHER; note = 5-methyl
  modified_base 10..12: mod_base = OTHER; note = 5-methyl
  modified_base 1: mod_base = OTHER; note = bicyclic nucleic acid (BNA)
  modified_base 12..13: mod_base = OTHER; note = bicyclic nucleic acid (BNA)
  modified_base 18: mod_base = OTHER; note = bicyclic nucleic acid (BNA)
  source 1..18: mol_type = other DNA
ctgtccaagcccggttga

SEQ ID NO: 13758 - DNA, 18 bp, synthetic construct
  misc_feature 1..18: note = Description of Artificial Sequence: Synthetic Antisense oligonucleotide
  modified_base 1: mod_base = OTHER; note = 5-methyl
  modified_base 5..6: mod_base = OTHER; note = 5-methyl
  modified_base 10..12: mod_base = OTHER; note = 5-methyl
  modified_base 1: mod_base = OTHER; note = bicyclic nucleic acid (BNA)
  modified_base 5: mod_base = OTHER; note = bicyclic nucleic acid (BNA)
  modified_base 12: mod_base = OTHER; note = bicyclic nucleic acid (BNA)
  modified_base 18: mod_base = OTHER; note = bicyclic nucleic acid (BNA)
  source 1..18: mol_type = other DNA
ctgtccaagcccggttga

SEQ ID NO: 13759 - DNA, 18 bp, synthetic construct
  misc_feature 1..18: note = Description of Artificial Sequence: Synthetic Antisense oligonucleotide
  modified_base 1: mod_base = OTHER; note = 5-methyl
  modified_base 5..6: mod_base = OTHER; note = 5-methyl
  modified_base 10..12: mod_base = OTHER; note = 5-methyl
  modified_base 1: mod_base = OTHER; note = bicyclic nucleic acid (BNA)
  modified_base 10: mod_base = OTHER; note = bicyclic nucleic acid (BNA)
  modified_base 14: mod_base = OTHER; note = bicyclic nucleic acid (BNA)
  modified_base 18: mod_base = OTHER; note = bicyclic nucleic acid (BNA)
  source 1..18: mol_type = other DNA
ctgtccaagcccggttga

SEQ ID NO: 13760 - DNA, 18 bp, synthetic construct
  misc_feature 1..18: note = Description of Artificial Sequence: Synthetic Antisense oligonucleotide
  modified_base 1: mod_base = OTHER; note = 5-methyl
  modified_base 5..6: mod_base = OTHER; note = 5-methyl
  modified_base 10..12: mod_base = OTHER; note = 5-methyl
  modified_base 1: mod_base = OTHER; note = bicyclic nucleic acid (BNA)
  modified_base 6: mod_base = OTHER; note = bicyclic nucleic acid (BNA)
  modified_base 11: mod_base = OTHER; note = bicyclic nucleic acid (BNA)
  modified_base 18: mod_base = OTHER; note = bicyclic nucleic acid (BNA)
  source 1..18: mol_type = other DNA
ctgtccaagcccggttga

SEQ ID NO: 13761 - DNA, 18 bp, synthetic construct
  misc_feature 1..18: note = Description of Artificial Sequence: Synthetic Antisense oligonucleotide
  modified_base 1: mod_base = OTHER; note = 5-methyl
  modified_base 5..6: mod_base = OTHER; note = 5-methyl
  modified_base 10..12: mod_base = OTHER; note = 5-methyl
  modified_base 1: mod_base = OTHER; note = bicyclic nucleic acid (BNA)
  modified_base 6: mod_base = OTHER; note = bicyclic nucleic acid (BNA)
  modified_base 17..18: mod_base = OTHER; note = bicyclic nucleic acid (BNA)
  source 1..18: mol_type = other DNA
ctgtccaagcccggttga

SEQ ID NO: 13762 - DNA, 18 bp, synthetic construct
  misc_feature 1..18: note = Description of Artificial Sequence: Synthetic Antisense oligonucleotide
  modified_base 1: mod_base = OTHER; note = 5-methyl
  modified_base 5..6: mod_base = OTHER; note = 5-methyl
  modified_base 10..12: mod_base = OTHER; note = 5-methyl
  modified_base 1: mod_base = OTHER; note = bicyclic nucleic acid (BNA)
  modified_base 9: mod_base = OTHER; note = bicyclic nucleic acid (BNA)
  modified_base 13: mod_base = OTHER; note = bicyclic nucleic acid (BNA)
  modified_base 18: mod_base = OTHER; note = bicyclic nucleic acid (BNA)
  source 1..18: mol_type = other DNA
ctgtccaagcccggttga

SEQ ID NO: 13763 - DNA, 18 bp, synthetic construct
  misc_feature 1..18: note = Description of Artificial Sequence: Synthetic Antisense oligonucleotide
  modified_base 1: mod_base = OTHER; note = 5-methyl
  modified_base 5..6: mod_base = OTHER; note = 5-methyl
  modified_base 10..12: mod_base = OTHER; note = 5-methyl
  modified_base 1: mod_base = OTHER; note = bicyclic nucleic acid (BNA)
  modified_base 11: mod_base = OTHER; note = bicyclic nucleic acid (BNA)
  modified_base 17..18: mod_base = OTHER; note = bicyclic nucleic acid (BNA)
  source 1..18: mol_type = other DNA
ctgtccaagcccggttga

SEQ ID NO: 13764 - DNA, 18 bp, synthetic construct
  misc_feature 1..18: note = Description of Artificial Sequence: Synthetic Antisense oligonucleotide
  modified_base 1: mod_base = OTHER; note = 5-methyl
  modified_base 5..6: mod_base = OTHER; note = 5-methyl
  modified_base 10..12: mod_base = OTHER; note = 5-methyl
  modified_base 1: mod_base = OTHER; note = bicyclic nucleic acid (BNA)
  modified_base 3: mod_base = OTHER; note = bicyclic nucleic acid (BNA)
  modified_base 12: mod_base = OTHER; note = bicyclic nucleic acid (BNA)
  modified_base 18: mod_base = OTHER; note = bicyclic nucleic acid (BNA)
  source 1..18: mol_type = other DNA
ctgtccaagcccggttga

SEQ ID NO: 13765 - DNA, 18 bp, synthetic construct
  misc_feature 1..18: note = Description of Artificial Sequence: Synthetic Antisense oligonucleotide
  modified_base 1: mod_base = OTHER; note = 5-methyl
  modified_base 5..6: mod_base = OTHER; note = 5-methyl
  modified_base 10..12: mod_base = OTHER; note = 5-methyl
  modified_base 1: mod_base = OTHER; note = bicyclic nucleic acid (BNA)
  modified_base 3: mod_base = OTHER; note = bicyclic nucleic acid (BNA)
  modified_base 5: mod_base = OTHER; note = bicyclic nucleic acid (BNA)
  modified_base 18: mod_base = OTHER; note = bicyclic nucleic acid (BNA)
  source 1..18: mol_type = other DNA
ctgtccaagcccggttga

SEQ ID NO: 13766 - DNA, 18 bp, synthetic construct
  misc_feature 1..18: note = Description of Artificial Sequence: Synthetic Antisense oligonucleotide
  modified_base 1: mod_base = OTHER; note = 5-methyl
  modified_base 5..6: mod_base = OTHER; note = 5-methyl
  modified_base 10..12: mod_base = OTHER; note = 5-methyl
  modified_base 1: mod_base = OTHER; note = bicyclic nucleic acid (BNA)
  modified_base 10: mod_base = OTHER; note = bicyclic nucleic acid (BNA)
  modified_base 13: mod_base = OTHER; note = bicyclic nucleic acid (BNA)
  modified_base 18: mod_base = OTHER; note = bicyclic nucleic acid (BNA)
  source 1..18: mol_type = other DNA
ctgtccaagcccggttga

SEQ ID NO: 13767 - DNA, 20 bp, synthetic construct
  misc_feature 1..20: note = Description of Artificial Sequence: Synthetic Antisense oligonucleotide
  modified_base 1..2: mod_base = OTHER; note = bicyclic nucleic acid (BNA)
  modified_base 20: mod_base = OTHER; note = bicyclic nucleic acid (BNA)
  modified_base 2: mod_base = OTHER; note = 5-methyl
  modified_base 14: mod_base = OTHER; note = 5-methyl
  modified_base 19: mod_base = OTHER; note = 5-methyl
  source 1..20: mol_type = other DNA
tcaaggaagatggcatttct

SEQ ID NO: 13768 - DNA, 20 bp, synthetic construct
  misc_feature 1..20: note = Description of Artificial Sequence: Synthetic Antisense oligonucleotide
  modified_base 1: mod_base = OTHER; note = bicyclic nucleic acid (BNA)
  modified_base 9: mod_base = OTHER; note = bicyclic nucleic acid (BNA)
  modified_base 20: mod_base = OTHER; note = bicyclic nucleic acid (BNA)
  modified_base 2: mod_base = OTHER; note = 5-methyl
  modified_base 14: mod_base = OTHER; note = 5-methyl
  modified_base 19: mod_base = OTHER; note = 5-methyl
  source 1..20: mol_type = other DNA
tcaaggaagatggcatttct

SEQ ID NO: 13769 - DNA, 20 bp, synthetic construct
  misc_feature 1..20: note = Description of Artificial Sequence: Synthetic Antisense oligonucleotide
  modified_base 1: mod_base = OTHER; note = bicyclic nucleic acid (BNA)
  modified_base 5: mod_base = OTHER; note = bicyclic nucleic acid (BNA)
  modified_base 20: mod_base = OTHER; note = bicyclic nucleic acid (BNA)
  modified_base 2: mod_base = OTHER; note = 5-methyl
  modified_base 14: mod_base = OTHER; note = 5-methyl
  modified_base 19: mod_base = OTHER; note = 5-methyl
  source 1..20: mol_type = other DNA
tcaaggaagatggcatttct

SEQ ID NO: 13770 - DNA, 20 bp, synthetic construct
  misc_feature 1..20: note = Description of Artificial Sequence: Synthetic Antisense oligonucleotide
  modified_base 1: mod_base = OTHER; note = bicyclic nucleic acid (BNA)
  modified_base 6: mod_base = OTHER; note = bicyclic nucleic acid (BNA)
  modified_base 20: mod_base = OTHER; note = bicyclic nucleic acid (BNA)
  modified_base 2: mod_base = OTHER; note = 5-methyl
  modified_base 14: mod_base = OTHER; note = 5-methyl
  modified_base 19: mod_base = OTHER; note = 5-methyl
  source 1..20: mol_type = other DNA
tcaaggaagatggcatttct

SEQ ID NO: 13771 - DNA, 20 bp, synthetic construct
  misc_feature 1..20: note = Description of Artificial Sequence: Synthetic Antisense oligonucleotide
  modified_base 1: mod_base = OTHER; note = bicyclic nucleic acid (BNA)
  modified_base 12: mod_base = OTHER; note = bicyclic nucleic acid (BNA)
  modified_base 20: mod_base = OTHER; note = bicyclic nucleic acid (BNA)
  modified_base 2: mod_base = OTHER; note = 5-methyl
  modified_base 14: mod_base = OTHER; note = 5-methyl
  modified_base 19: mod_base = OTHER; note = 5-methyl
  source 1..20: mol_type = other DNA
tcaaggaagatggcatttct

SEQ ID NO: 13772 - DNA, 20 bp, synthetic construct
  misc_feature 1..20: note = Description of Artificial Sequence: Synthetic Antisense oligonucleotide
  modified_base 1: mod_base = OTHER; note = bicyclic nucleic acid (BNA)
  modified_base 13: mod_base = OTHER; note = bicyclic nucleic acid (BNA)
  modified_base 20: mod_base = OTHER; note = bicyclic nucleic acid (BNA)
  modified_base 2: mod_base = OTHER; note = 5-methyl
  modified_base 14: mod_base = OTHER; note = 5-methyl
  modified_base 19: mod_base = OTHER; note = 5-methyl
  source 1..20: mol_type = other DNA
tcaaggaagatggcatttct

SEQ ID NO: 13773 - DNA, 20 bp, synthetic construct
  misc_feature 1..20: note = Description of Artificial Sequence: Synthetic Antisense oligonucleotide
  modified_base 1: mod_base = OTHER; note = bicyclic nucleic acid (BNA)
  modified_base 19..20: mod_base = OTHER; note = bicyclic nucleic acid (BNA)
  modified_base 2: mod_base = OTHER; note = 5-methyl
  modified_base 14: mod_base = OTHER; note = 5-methyl
  modified_base 19: mod_base = OTHER; note = 5-methyl
  source 1..20: mol_type = other DNA
tcaaggaagatggcatttct

SEQ ID NO: 13774 - DNA, 20 bp, synthetic construct
  misc_feature 1..20: note = Description of Artificial Sequence: Synthetic Antisense oligonucleotide
  modified_base 1: mod_base = OTHER; note = bicyclic nucleic acid (BNA)
  modified_base 14: mod_base = OTHER; note = bicyclic nucleic acid (BNA)
  modified_base 20: mod_base = OTHER; note = bicyclic nucleic acid (BNA)
  modified_base 2: mod_base = OTHER; note = 5-methyl
  modified_base 14: mod_base = OTHER; note = 5-methyl
  modified_base 19: mod_base = OTHER; note = 5-methyl
  source 1..20: mol_type = other DNA
tcaaggaagatggcatttct

SEQ ID NO: 13775 - DNA, 22 bp, synthetic construct
  misc_feature 1..22: note = Description of Artificial Sequence: Synthetic Antisense oligonucleotide
  modified_base 1..2: mod_base = OTHER; note = bicyclic nucleic acid (BNA)
  modified_base 22: mod_base = OTHER; note = bicyclic nucleic acid (BNA)
  modified_base 2: mod_base = OTHER; note = 5-methyl
  modified_base 14: mod_base = OTHER; note = 5-methyl
  modified_base 19: mod_base = OTHER; note = 5-methyl
  source 1..22: mol_type = other DNA
tcaaggaagatggcatttctag

SEQ ID NO: 13776 - DNA, 22 bp, synthetic construct
  misc_feature 1..22: note = Description of Artificial Sequence: Synthetic Antisense oligonucleotide
  modified_base 1: mod_base = OTHER; note = bicyclic nucleic acid (BNA)
  modified_base 9: mod_base = OTHER; note = bicyclic nucleic acid (BNA)
  modified_base 22: mod_base = OTHER; note = bicyclic nucleic acid (BNA)
  modified_base 2: mod_base = OTHER; note = 5-methyl
  modified_base 14: mod_base = OTHER; note = 5-methyl
  modified_base 19: mod_base = OTHER; note = 5-methyl
  source 1..22: mol_type = other DNA
tcaaggaagatggcatttctag

SEQ ID NO: 13777 - DNA, 22 bp, synthetic construct
  misc_feature 1..22: note = Description of Artificial Sequence: Synthetic Antisense oligonucleotide
  modified_base 1: mod_base = OTHER; note = bicyclic nucleic acid (BNA)
  modified_base 5: mod_base = OTHER; note = bicyclic nucleic acid (BNA)
  modified_base 22: mod_base = OTHER; note = bicyclic nucleic acid (BNA)
  modified_base 2: mod_base = OTHER; note = 5-methyl
  modified_base 14: mod_base = OTHER; note = 5-methyl
  modified_base 19: mod_base = OTHER; note = 5-methyl
  source 1..22: mol_type = other DNA
tcaaggaagatggcatttctag

SEQ ID NO: 13778 - DNA, 22 bp, synthetic construct
  misc_feature 1..22: note = Description of Artificial Sequence: Synthetic Antisense oligonucleotide
  modified_base 1: mod_base = OTHER; note = bicyclic nucleic acid (BNA)
  modified_base 6: mod_base = OTHER; note = bicyclic nucleic acid (BNA)
  modified_base 22: mod_base = OTHER; note = bicyclic nucleic acid (BNA)
  modified_base 2: mod_base = OTHER; note = 5-methyl
  modified_base 14: mod_base = OTHER; note = 5-methyl
  modified_base 19: mod_base = OTHER; note = 5-methyl
  source 1..22: mol_type = other DNA
tcaaggaagatggcatttctag

SEQ ID NO: 13779 - DNA, 22 bp, synthetic construct
  misc_feature 1..22: note = Description of Artificial Sequence: Synthetic Antisense oligonucleotide
  modified_base 1: mod_base = OTHER; note = bicyclic nucleic acid (BNA)
  modified_base 12: mod_base = OTHER; note = bicyclic nucleic acid (BNA)
  modified_base 22: mod_base = OTHER; note = bicyclic nucleic acid (BNA)
  modified_base 2: mod_base = OTHER; note = 5-methyl
  modified_base 14: mod_base = OTHER; note = 5-methyl
  modified_base 19: mod_base = OTHER; note = 5-methyl
  source 1..22: mol_type = other DNA
tcaaggaagatggcatttctag

SEQ ID NO: 13780 - DNA, 22 bp, synthetic construct
  misc_feature 1..22: note = Description of Artificial Sequence: Synthetic Antisense oligonucleotide
  modified_base 1: mod_base = OTHER; note = bicyclic nucleic acid (BNA)
  modified_base 13: mod_base = OTHER; note = bicyclic nucleic acid (BNA)
  modified_base 22: mod_base = OTHER; note = bicyclic nucleic acid (BNA)
  modified_base 2: mod_base = OTHER; note = 5-methyl
  modified_base 14: mod_base = OTHER; note = 5-methyl
  modified_base 19: mod_base = OTHER; note = 5-methyl
  source 1..22: mol_type = other DNA
tcaaggaagatggcatttctag

SEQ ID NO: 13781 - DNA, 22 bp, synthetic construct
  misc_feature 1..22: note = Description of Artificial Sequence: Synthetic Antisense oligonucleotide
  modified_base 1: mod_base = OTHER; note = bicyclic nucleic acid (BNA)
  modified_base 19: mod_base = OTHER; note = bicyclic nucleic acid (BNA)
  modified_base 22: mod_base = OTHER; note = bicyclic nucleic acid (BNA)
  modified_base 2: mod_base = OTHER; note = 5-methyl
  modified_base 14: mod_base = OTHER; note = 5-methyl
  modified_base 19: mod_base = OTHER; note = 5-methyl
  source 1..22: mol_type = other DNA
tcaaggaagatggcatttctag

SEQ ID NO: 13782 - DNA, 22 bp, synthetic construct
  misc_feature 1..22: note = Description of Artificial Sequence: Synthetic Antisense oligonucleotide
  modified_base 1: mod_base = OTHER; note = bicyclic nucleic acid (BNA)
  modified_base 14: mod_base = OTHER; note = bicyclic nucleic acid (BNA)
  modified_base 22: mod_base = OTHER; note = bicyclic nucleic acid (BNA)
  modified_base 2: mod_base = OTHER; note = 5-methyl
  modified_base 14: mod_base = OTHER; note = 5-methyl
  modified_base 19: mod_base = OTHER; note = 5-methyl
  source 1..22: mol_type = other DNA
tcaaggaagatggcatttctag

SEQ ID NO: 13783 - DNA, 20 bp, synthetic construct
  misc_feature 1..20: note = Description of Artificial Sequence: Synthetic Antisense oligonucleotide
  modified_base 1: mod_base = OTHER; note = bicyclic nucleic acid (BNA)
  modified_base 9: mod_base = OTHER; note = bicyclic nucleic acid (BNA)
  modified_base 14: mod_base = OTHER; note = bicyclic nucleic acid (BNA)
  modified_base 20: mod_base = OTHER; note = bicyclic nucleic acid (BNA)
  modified_base 2: mod_base = OTHER; note = 5-methyl
  modified_base 14: mod_base = OTHER; note = 5-methyl
  modified_base 19: mod_base = OTHER; note = 5-methyl
  source 1..20: mol_type = other DNA
tcaaggaagatggcatttct

SEQ ID NO: 13784 - DNA, 20 bp, synthetic construct
  misc_feature 1..20: note = Description of Artificial Sequence: Synthetic Antisense oligonucleotide
  modified_base 1: mod_base = OTHER; note = bicyclic nucleic acid (BNA)
  modified_base 5: mod_base = OTHER; note = bicyclic nucleic acid (BNA)
  modified_base 9: mod_base = OTHER; note = bicyclic nucleic acid (BNA)
  modified_base 20: mod_base = OTHER; note = bicyclic nucleic acid (BNA)
  modified_base 2: mod_base = OTHER; note = 5-methyl
  modified_base 14: mod_base = OTHER; note = 5-methyl
  modified_base 19: mod_base = OTHER; note = 5-methyl
  source 1..20: mol_type = other DNA
tcaaggaagatggcatttct

SEQ ID NO: 13785 - DNA, 20 bp, synthetic construct
  misc_feature 1..20: note = Description of Artificial Sequence: Synthetic Antisense oligonucleotide
  modified_base 1: mod_base = OTHER; note = bicyclic nucleic acid (BNA)
  modified_base 5: mod_base = OTHER; note = bicyclic nucleic acid (BNA)
  modified_base 19..20: mod_base = OTHER; note = bicyclic nucleic acid (BNA)
  modified_base 2: mod_base = OTHER; note = 5-methyl
  modified_base 14: mod_base = OTHER; note = 5-methyl
  modified_base 19: mod_base = OTHER; note = 5-methyl
  source 1..20: mol_type = other DNA
tcaaggaagatggcatttct

SEQ ID NO: 13786 - DNA, 20 bp, synthetic construct
  misc_feature 1..20: note = Description of Artificial Sequence: Synthetic Antisense oligonucleotide
  modified_base 1: mod_base = OTHER; note = bicyclic nucleic acid (BNA)
  modified_base 6: mod_base = OTHER; note = bicyclic nucleic acid (BNA)
  modified_base 14: mod_base = OTHER; note = bicyclic nucleic acid (BNA)
  modified_base 20: mod_base = OTHER; note = bicyclic nucleic acid (BNA)
  modified_base 2: mod_base = OTHER; note = 5-methyl
  modified_base 14: mod_base = OTHER; note = 5-methyl
  modified_base 19: mod_base = OTHER; note = 5-methyl
  source 1..20: mol_type = other DNA
tcaaggaagatggcatttct

SEQ ID NO: 13787 - DNA, 20 bp, synthetic construct
  misc_feature 1..20: note = Description of Artificial Sequence: Synthetic Antisense oligonucleotide
  modified_base 1: mod_base = OTHER; note = bicyclic nucleic acid (BNA)
  modified_base 5: mod_base = OTHER; note = bicyclic nucleic acid (BNA)
  modified_base 13: mod_base = OTHER; note = bicyclic nucleic acid (BNA)
  modified_base 20: mod_base = OTHER; note = bicyclic nucleic acid (BNA)
  modified_base 2: mod_base = OTHER; note = 5-methyl
  modified_base 14: mod_base = OTHER; note = 5-methyl
  modified_base 19: mod_base = OTHER; note = 5-methyl
  source 1..20: mol_type = other DNA
tcaaggaagatggcatttct

SEQ ID NO: 13788 - DNA, 20 bp, synthetic construct
  misc_feature 1..20: note = Description of Artificial Sequence: Synthetic Antisense oligonucleotide
  modified_base 1..2: mod_base = OTHER; note = bicyclic nucleic acid (BNA)
  modified_base 12: mod_base = OTHER; note = bicyclic nucleic acid (BNA)
  modified_base 20: mod_base = OTHER; note = bicyclic nucleic acid (BNA)
  modified_base 2: mod_base = OTHER; note = 5-methyl
  modified_base 14: mod_base = OTHER; note = 5-methyl
  modified_base 19: mod_base = OTHER; note = 5-methyl
  source 1..20: mol_type = other DNA
tcaaggaagatggcatttct

SEQ ID NO: 13789 - DNA, 20 bp, synthetic construct
  misc_feature 1..20: note = Description of Artificial Sequence: Synthetic Antisense oligonucleotide
  modified_base 1: mod_base = OTHER; note = bicyclic nucleic acid (BNA)
  modified_base 6: mod_base = OTHER; note = bicyclic nucleic acid (BNA)
  modified_base 9: mod_base = OTHER; note = bicyclic nucleic acid (BNA)
  modified_base 20: mod_base = OTHER; note = bicyclic nucleic acid (BNA)
  modified_base 2: mod_base = OTHER; note = 5-methyl
  modified_base 14: mod_base = OTHER; note = 5-methyl
  modified_base 19: mod_base = OTHER; note = 5-methyl
  source 1..20: mol_type = other DNA
tcaaggaagatggcatttct

SEQ ID NO: 13790 - DNA, 20 bp, synthetic construct
  misc_feature 1..20: note = Description of Artificial Sequence: Synthetic Antisense oligonucleotide
  modified_base 1: mod_base = OTHER; note = bicyclic nucleic acid (BNA)
  modified_base 13..14: mod_base = OTHER; note = bicyclic nucleic acid (BNA)
  modified_base 20: mod_base = OTHER; note = bicyclic nucleic acid (BNA)
  modified_base 2: mod_base = OTHER; note = 5-methyl
  modified_base 14: mod_base = OTHER; note = 5-methyl
  modified_base 19: mod_base = OTHER; note = 5-methyl
  source 1..20: mol_type = other DNA
tcaaggaagatggcatttct

SEQ ID NO: 13791 - DNA, 20 bp, synthetic construct
  misc_feature 1..20: note = Description of Artificial Sequence: Synthetic Antisense oligonucleotide
  modified_base 1: mod_base = OTHER; note = bicyclic nucleic acid (BNA)
  modified_base 6: mod_base = OTHER; note = bicyclic nucleic acid (BNA)
  modified_base 13: mod_base = OTHER; note = bicyclic nucleic acid (BNA)
  modified_base 20: mod_base = OTHER; note = bicyclic nucleic acid (BNA)
  modified_base 2: mod_base = OTHER; note = 5-methyl
  modified_base 14: mod_base = OTHER; note = 5-methyl
  modified_base 19: mod_base = OTHER; note = 5-methyl
  source 1..20: mol_type = other DNA
tcaaggaagatggcatttct

SEQ ID NO: 13792 - DNA, 20 bp, synthetic construct
  misc_feature 1..20: note = Description of Artificial Sequence: Synthetic Antisense oligonucleotide
  modified_base 1: mod_base = OTHER; note = bicyclic nucleic acid (BNA)
  modified_base 6: mod_base = OTHER; note = bicyclic nucleic acid (BNA)
  modified_base 19..20: mod_base = OTHER; note = bicyclic nucleic acid (BNA)
  modified_base 2: mod_base = OTHER; note = 5-methyl
  modified_base 14: mod_base = OTHER; note = 5-methyl
  modified_base 19: mod_base = OTHER; note = 5-methyl
  source 1..20: mol_type = other DNA
tcaaggaagatggcatttct

SEQ ID NO: 13793 - DNA, 20 bp, synthetic construct
  misc_feature 1..20: note = Description of Artificial Sequence: Synthetic Antisense oligonucleotide
  modified_base 1: mod_base = OTHER; note = bicyclic nucleic acid (BNA)
  modified_base 5: mod_base = OTHER; note = bicyclic nucleic acid (BNA)
  modified_base 14: mod_base = OTHER; note = bicyclic nucleic acid (BNA)
  modified_base 20: mod_base = OTHER; note = bicyclic nucleic acid (BNA)
  modified_base 2: mod_base = OTHER; note = 5-methyl
  modified_base 14: mod_base = OTHER; note = 5-methyl
  modified_base 19: mod_base = OTHER; note = 5-methyl
  source 1..20: mol_type = other DNA
tcaaggaagatggcatttct

SEQ ID NO: 13794 - DNA, 20 bp, synthetic construct
  misc_feature 1..20: note = Description of Artificial Sequence: Synthetic Antisense oligonucleotide
  modified_base 1..2: mod_base = OTHER; note = bicyclic nucleic acid (BNA)
  modified_base 6: mod_base = OTHER; note = bicyclic nucleic acid (BNA)
  modified_base 20: mod_base = OTHER; note = bicyclic nucleic acid (BNA)
  modified_base 2: mod_base = OTHER; note = 5-methyl
  modified_base 14: mod_base = OTHER; note = 5-methyl
  modified_base 19: mod_base = OTHER; note = 5-methyl
  source 1..20: mol_type = other DNA
tcaaggaagatggcatttct

SEQ ID NO: 13795 - DNA, 20 bp, synthetic construct
  misc_feature 1..20: note = Description of Artificial Sequence: Synthetic Antisense oligonucleotide
  modified_base 1: mod_base = OTHER; note = bicyclic nucleic acid (BNA)
  modified_base 12: mod_base = OTHER; note = bicyclic nucleic acid (BNA)
  modified_base 19..20: mod_base = OTHER; note = bicyclic nucleic acid (BNA)
  modified_base 2: mod_base = OTHER; note = 5-methyl
  modified_base 14: mod_base = OTHER; note = 5-methyl
  modified_base 19: mod_base = OTHER; note = 5-methyl
  source 1..20: mol_type = other DNA
tcaaggaagatggcatttct

SEQ ID NO: 13796 - DNA, 20 bp, synthetic construct
  misc_feature 1..20: note = Description of Artificial Sequence: Synthetic Antisense oligonucleotide
  modified_base 1: mod_base = OTHER; note = bicyclic nucleic acid (BNA)
  modified_base 12: mod_base = OTHER; note = bicyclic nucleic acid (BNA)
  modified_base 14: mod_base = OTHER; note = bicyclic nucleic acid (BNA)
  modified_base 20: mod_base = OTHER; note = bicyclic nucleic acid (BNA)
  modified_base 2: mod_base = OTHER; note = 5-methyl
  modified_base 14: mod_base = OTHER; note = 5-methyl
  modified_base 19: mod_base = OTHER; note = 5-methyl
  source 1..20: mol_type = other DNA
tcaaggaagatggcatttct

SEQ ID NO: 13797 - DNA, 20 bp, synthetic construct
  misc_feature 1..20: note = Description of Artificial Sequence: Synthetic Antisense oligonucleotide
  modified_base 1: mod_base = OTHER; note = bicyclic nucleic acid (BNA)
  modified_base 6: mod_base = OTHER; note = bicyclic nucleic acid (BNA)
  modified_base 12: mod_base = OTHER; note = bicyclic nucleic acid (BNA)
  modified_base 20: mod_base = OTHER; note = bicyclic nucleic acid (BNA)
  modified_base 2: mod_base = OTHER; note = 5-methyl
  modified_base 14: mod_base = OTHER; note = 5-methyl
  modified_base 19: mod_base = OTHER; note = 5-methyl
  source 1..20: mol_type = other DNA
tcaaggaagatggcatttct

SEQ ID NO: 13798 - DNA, 20 bp, synthetic construct
  misc_feature 1..20: note = Description of Artificial Sequence: Synthetic Antisense oligonucleotide
  modified_base 1: mod_base = OTHER; note = bicyclic nucleic acid (BNA)
  modified_base 5..6: mod_base = OTHER; note = bicyclic nucleic acid (BNA)
  modified_base 20: mod_base = OTHER; note = bicyclic nucleic acid (BNA)
  modified_base 2: mod_base = OTHER; note = 5-methyl
  modified_base 14: mod_base = OTHER; note = 5-methyl
  modified_base 19: mod_base = OTHER; note = 5-methyl
  source 1..20: mol_type = other DNA
tcaaggaagatggcatttct

SEQ ID NO: 13799 - DNA, 20 bp, synthetic construct
  misc_feature 1..20: note = Description of Artificial Sequence: Synthetic Antisense oligonucleotide
  modified_base 1..2: mod_base = OTHER; note = bicyclic nucleic acid (BNA)
  modified_base 14: mod_base = OTHER; note = bicyclic nucleic acid (BNA)
  modified_base 20: mod_base = OTHER; note = bicyclic nucleic acid (BNA)
  modified_base 2: mod_base = OTHER; note = 5-methyl
  modified_base 14: mod_base = OTHER; note = 5-methyl
  modified_base 19: mod_base = OTHER; note = 5-methyl
  source 1..20: mol_type = other DNA
tcaaggaagatggcatttct

SEQ ID NO: 13800 - DNA, 20 bp, synthetic construct
  misc_feature 1..20: note = Description of Artificial Sequence: Synthetic Antisense oligonucleotide
  modified_base 1: mod_base = OTHER; note = bicyclic nucleic acid (BNA)
  modified_base 9: mod_base = OTHER; note = bicyclic nucleic acid (BNA)
  modified_base 12: mod_base = OTHER; note = bicyclic nucleic acid (BNA)
  modified_base 20: mod_base = OTHER; note = bicyclic nucleic acid (BNA)
  modified_base 2: mod_base = OTHER; note = 5-methyl
  modified_base 14: mod_base = OTHER; note = 5-methyl
  modified_base 19: mod_base = OTHER; note = 5-methyl
  source 1..20: mol_type = other DNA
tcaaggaagatggcatttct

SEQ ID NO: 13801 - DNA, 20 bp, synthetic construct
  misc_feature 1..20: note = Description of Artificial Sequence: Synthetic Antisense oligonucleotide
  modified_base 1..2: mod_base = OTHER; note = bicyclic nucleic acid (BNA)
  modified_base 5: mod_base = OTHER; note = bicyclic nucleic acid (BNA)
  modified_base 20: mod_base = OTHER; note = bicyclic nucleic acid (BNA)
  modified_base 2: mod_base = OTHER; note = 5-methyl
  modified_base 14: mod_base = OTHER; note = 5-methyl
  modified_base 19: mod_base = OTHER; note = 5-methyl
  source 1..20: mol_type = other DNA
tcaaggaagatggcatttct

SEQ ID NO: 13802 - DNA, 20 bp, synthetic construct
  misc_feature 1..20: note = Description of Artificial Sequence: Synthetic Antisense oligonucleotide
  modified_base 1: mod_base = OTHER; note = bicyclic nucleic acid (BNA)
  modified_base 13: mod_base = OTHER; note = bicyclic nucleic acid (BNA)
  modified_base 19..20: mod_base = OTHER; note = bicyclic nucleic acid (BNA)
  modified_base 2: mod_base = OTHER; note = 5-methyl
  modified_base 14: mod_base = OTHER; note = 5-methyl
  modified_base 19: mod_base = OTHER; note = 5-methyl
  source 1..20: mol_type = other DNA
tcaaggaagatggcatttct

SEQ ID NO: 13803 - DNA, 20 bp, synthetic construct
  misc_feature 1..20: note = Description of Artificial Sequence: Synthetic Antisense oligonucleotide
  modified_base 1: mod_base = OTHER; note = bicyclic nucleic acid (BNA)
  modified_base 12..13: mod_base = OTHER; note = bicyclic nucleic acid (BNA)
  modified_base 20: mod_base = OTHER; note = bicyclic nucleic acid (BNA)
  modified_base 2: mod_base = OTHER; note = 5-methyl
  modified_base 14: mod_base = OTHER; note = 5-methyl
  modified_base 19: mod_base = OTHER; note = 5-methyl
  source 1..20: mol_type = other DNA
tcaaggaagatggcatttct

SEQ ID NO: 13804 - DNA, 20 bp, synthetic construct
  misc_feature 1..20: note = Description of Artificial Sequence: Synthetic Antisense oligonucleotide
  modified_base 1: mod_base = OTHER; note = bicyclic nucleic acid (BNA)
  modified_base 5: mod_base = OTHER; note = bicyclic nucleic acid (BNA)
  modified_base 12: mod_base = OTHER; note = bicyclic nucleic acid (BNA)
  modified_base 20: mod_base = OTHER; note = bicyclic nucleic acid (BNA)
  modified_base 2: mod_base = OTHER; note = 5-methyl
  modified_base 14: mod_base = OTHER; note = 5-methyl
  modified_base 19: mod_base = OTHER; note = 5-methyl
  source 1..20: mol_type = other DNA
tcaaggaagatggcatttct

SEQ ID NO: 13805 - DNA, 20 bp, synthetic construct
  misc_feature 1..20: note = Description of Artificial Sequence: Synthetic Antisense oligonucleotide
  modified_base 1..2: mod_base = OTHER; note = bicyclic nucleic acid (BNA)
  modified_base 13: mod_base = OTHER; note = bicyclic nucleic acid (BNA)
  modified_base 20: mod_base = OTHER; note = bicyclic nucleic acid (BNA)
  modified_base 2: mod_base = OTHER; note = 5-methyl
  modified_base 14: mod_base = OTHER; note = 5-methyl
  modified_base 19: mod_base = OTHER; note = 5-methyl
  source 1..20: mol_type = other DNA
tcaaggaagatggcatttct

SEQ ID NO: 13806 - DNA, 20 bp, synthetic construct
  misc_feature 1..20: note = Description of Artificial Sequence: Synthetic Antisense oligonucleotide
  modified_base 1: mod_base = OTHER; note = bicyclic nucleic acid (BNA)
  modified_base 9: mod_base = OTHER; note = bicyclic nucleic acid (BNA)
  modified_base 13: mod_base = OTHER; note = bicyclic nucleic acid (BNA)
  modified_base 20: mod_base = OTHER; note = bicyclic nucleic acid (BNA)
  modified_base 2: mod_base = OTHER; note = 5-methyl
  modified_base 14: mod_base = OTHER; note = 5-methyl
  modified_base 19: mod_base = OTHER; note = 5-methyl
  source 1..20: mol_type = other DNA
tcaaggaagatggcatttct

SEQ ID NO: 13807 - DNA, 20 bp, synthetic construct
  misc_feature 1..20: note = Description of Artificial Sequence: Synthetic Antisense oligonucleotide
  modified_base 1..2: mod_base = OTHER; note = bicyclic nucleic acid (BNA)
  modified_base 19..20: mod_base = OTHER; note = bicyclic nucleic acid (BNA)
  modified_base 2: mod_base = OTHER; note = 5-methyl
  modified_base 14: mod_base = OTHER; note = 5-methyl
  modified_base 19: mod_base = OTHER; note = 5-methyl
  source 1..20: mol_type = other DNA
tcaaggaagatggcatttct

SEQ ID NO: 13808 - DNA, 20 bp, synthetic construct
  misc_feature 1..20: note = Description of Artificial Sequence: Synthetic Antisense oligonucleotide
  modified_base 1..2: mod_base = OTHER; note = bicyclic nucleic acid (BNA)
  modified_base 9: mod_base = OTHER; note = bicyclic nucleic acid (BNA)
  modified_base 20: mod_base = OTHER; note = bicyclic nucleic acid (BNA)
  modified_base 2: mod_base = OTHER; note = 5-methyl
  modified_base 14: mod_base = OTHER; note = 5-methyl
  modified_base 19: mod_base = OTHER; note = 5-methyl
  source 1..20: mol_type = other DNA
tcaaggaagatggcatttct

SEQ ID NO: 13809 - DNA, 20 bp, synthetic construct
  misc_feature 1..20: note = Description of Artificial Sequence: Synthetic Antisense oligonucleotide
  modified_base 1: mod_base = OTHER; note = bicyclic nucleic acid (BNA)
  modified_base 14: mod_base = OTHER; note = bicyclic nucleic acid (BNA)
  modified_base 19..20: mod_base = OTHER; note = bicyclic nucleic acid (BNA)
  modified_base 2: mod_base = OTHER; note = 5-methyl
  modified_base 14: mod_base = OTHER; note = 5-methyl
  modified_base 19: mod_base = OTHER; note = 5-methyl
  source 1..20: mol_type = other DNA
tcaaggaagatggcatttct

SEQ ID NO: 13810 - DNA, 20 bp, synthetic construct
  misc_feature 1..20: note = Description of Artificial Sequence: Synthetic Antisense oligonucleotide
  modified_base 1: mod_base = OTHER; note = bicyclic nucleic acid (BNA)
  modified_base 9: mod_base = OTHER; note = bicyclic nucleic acid (BNA)
  modified_base 19..20: mod_base = OTHER; note = bicyclic nucleic acid (BNA)
  modified_base 2: mod_base = OTHER; note = 5-methyl
  modified_base 14: mod_base = OTHER; note = 5-methyl
  modified_base 19: mod_base = OTHER; note = 5-methyl
  source 1..20: mol_type = other DNA
tcaaggaagatggcatttct

SEQ ID NO: 13811 - DNA, 22 bp, synthetic construct
  misc_feature 1..22: note = Description of Artificial Sequence: Synthetic Antisense oligonucleotide
  modified_base 1: mod_base = OTHER; note = bicyclic nucleic acid (BNA)
  modified_base 9: mod_base = OTHER; note = bicyclic nucleic acid (BNA)
  modified_base 14: mod_base = OTHER; note = bicyclic nucleic acid (BNA)
  modified_base 22: mod_base = OTHER; note = bicyclic nucleic acid (BNA)
  modified_base 2: mod_base = OTHER; note = 5-methyl
  modified_base 14: mod_base = OTHER; note = 5-methyl
  modified_base 19: mod_base = OTHER; note = 5-methyl
  source 1..22: mol_type = other DNA
tcaaggaagatggcatttctag

SEQ ID NO: 13812 - DNA, 22 bp, synthetic construct
  misc_feature 1..22: note = Description of Artificial Sequence: Synthetic Antisense oligonucleotide
  modified_base 1: mod_base = OTHER; note = bicyclic nucleic acid (BNA)
  modified_base 5: mod_base = OTHER; note = bicyclic nucleic acid (BNA)
  modified_base 9: mod_base = OTHER; note = bicyclic nucleic acid (BNA)
  modified_base 22: mod_base = OTHER; note = bicyclic nucleic acid (BNA)
  modified_base 2: mod_base = OTHER; note = 5-methyl
  modified_base 14: mod_base = OTHER; note = 5-methyl
  modified_base 19: mod_base = OTHER; note = 5-methyl
  source 1..22: mol_type = other DNA
tcaaggaagatggcatttctag

SEQ ID NO: 13813 - DNA, 22 bp, synthetic construct
  misc_feature 1..22: note = Description of Artificial Sequence: Synthetic Antisense oligonucleotide
  modified_base 1: mod_base = OTHER; note = bicyclic nucleic acid (BNA)
  modified_base 5: mod_base = OTHER; note = bicyclic nucleic acid (BNA)
  modified_base 19: mod_base = OTHER; note = bicyclic nucleic acid (BNA)
  modified_base 22: mod_base = OTHER; note = bicyclic nucleic acid (BNA)
  modified_base 2: mod_base = OTHER; note = 5-methyl
  modified_base 14: mod_base = OTHER; note = 5-methyl
  modified_base 19: mod_base = OTHER; note = 5-methyl
  source 1..22: mol_type = other DNA
tcaaggaagatggcatttctag

SEQ ID NO: 13814 - DNA, 22 bp, synthetic construct
  misc_feature 1..22: note = Description of Artificial Sequence: Synthetic Antisense oligonucleotide
  modified_base 1: mod_base = OTHER; note = bicyclic nucleic acid (BNA)
  modified_base 6: mod_base = OTHER; note = bicyclic nucleic acid (BNA)
  modified_base 14: mod_base = OTHER; note = bicyclic nucleic acid (BNA)
  modified_base 22: mod_base = OTHER; note = bicyclic nucleic acid (BNA)
  modified_base 2: mod_base = OTHER; note = 5-methyl
  modified_base 14: mod_base = OTHER; note = 5-methyl
  modified_base 19: mod_base = OTHER; note = 5-methyl
  source 1..22: mol_type = other DNA
tcaaggaagatggcatttctag

SEQ ID NO: 13815 - DNA, 22 bp, synthetic construct
  misc_feature 1..22: note = Description of Artificial Sequence: Synthetic Antisense oligonucleotide
  modified_base 1: mod_base = OTHER; note = bicyclic nucleic acid (BNA)
  modified_base 5: mod_base = OTHER; note = bicyclic nucleic acid (BNA)
  modified_base 13: mod_base = OTHER; note = bicyclic nucleic acid (BNA)
  modified_base 22: mod_base = OTHER; note = bicyclic nucleic acid (BNA)
  modified_base 2: mod_base = OTHER; note = 5-methyl
  modified_base 14: mod_base = OTHER; note = 5-methyl
  modified_base 19: mod_base = OTHER; note = 5-methyl
  source 1..22: mol_type = other DNA
tcaaggaagatggcatttctag

SEQ ID NO: 13816 - DNA, 22 bp, synthetic construct
  misc_feature 1..22: note = Description of Artificial Sequence: Synthetic Antisense oligonucleotide
  modified_base 1..2: mod_base = OTHER; note = bicyclic nucleic acid (BNA)
  modified_base 12: mod_base = OTHER; note = bicyclic nucleic acid (BNA)
  modified_base 22: mod_base = OTHER; note = bicyclic nucleic acid (BNA)
  modified_base 2: mod_base = OTHER; note = 5-methyl
  modified_base 14: mod_base = OTHER; note = 5-methyl
  modified_base 19: mod_base = OTHER; note = 5-methyl
  source 1..22: mol_type = other DNA
tcaaggaagatggcatttctag

SEQ ID NO: 13817 - DNA, 22 bp, synthetic construct
  misc_feature 1..22: note = Description of Artificial Sequence: Synthetic Antisense oligonucleotide
  modified_base 1: mod_base = OTHER; note = bicyclic nucleic acid (BNA)
  modified_base 6: mod_base = OTHER; note = bicyclic nucleic acid (BNA)
  modified_base 9: mod_base = OTHER; note = bicyclic nucleic acid (BNA)
  modified_base 22: mod_base = OTHER; note = bicyclic nucleic acid (BNA)
  modified_base 2: mod_base = OTHER; note = 5-methyl
  modified_base 14: mod_base = OTHER; note = 5-methyl
  modified_base 19: mod_base = OTHER; note = 5-methyl
  source 1..22: mol_type = other DNA
tcaaggaagatggcatttctag

SEQ ID NO: 13818 - DNA, 22 bp, synthetic construct
  misc_feature 1..22: note = Description of Artificial Sequence: Synthetic Antisense oligonucleotide
  modified_base 1: mod_base = OTHER; note = bicyclic nucleic acid (BNA)
  modified_base 13..14: mod_base = OTHER; note = bicyclic nucleic acid (BNA)
  modified_base 22: mod_base = OTHER; note = bicyclic nucleic acid (BNA)
  modified_base 2: mod_base = OTHER; note = 5-methyl
  modified_base 14: mod_base = OTHER; note = 5-methyl
  modified_base 19: mod_base = OTHER; note = 5-methyl
  source 1..22: mol_type = other DNA
tcaaggaagatggcatttctag

SEQ ID NO: 13819 - DNA, 22 bp, synthetic construct
  misc_feature 1..22: note = Description of Artificial Sequence: Synthetic Antisense oligonucleotide
  modified_base 1: mod_base = OTHER; note = bicyclic nucleic acid (BNA)
  modified_base 6: mod_base = OTHER; note = bicyclic nucleic acid (BNA)
  modified_base 13: mod_base = OTHER; note = bicyclic nucleic acid (BNA)
  modified_base 22: mod_base = OTHER; note = bicyclic nucleic acid (BNA)
  modified_base 2: mod_base = OTHER; note = 5-methyl
  modified_base 14: mod_base = OTHER; note = 5-methyl
  modified_base 19: mod_base = OTHER; note = 5-methyl
  source 1..22: mol_type = other DNA
tcaaggaagatggcatttctag

SEQ ID NO: 13820 - DNA, 22 bp, synthetic construct
  misc_feature 1..22: note = Description of Artificial Sequence: Synthetic Antisense oligonucleotide
  modified_base 1: mod_base = OTHER; note = bicyclic nucleic acid (BNA)
  modified_base 6: mod_base = OTHER; note = bicyclic nucleic acid (BNA)
  modified_base 19: mod_base = OTHER; note = bicyclic nucleic acid (BNA)
  modified_base 22: mod_base = OTHER; note = bicyclic nucleic acid (BNA)
  modified_base 2: mod_base = OTHER; note = 5-methyl
  modified_base 14: mod_base = OTHER; note = 5-methyl
  modified_base 19: mod_base = OTHER; note = 5-methyl
  source 1..22: mol_type = other DNA
tcaaggaagatggcatttctag

SEQ ID NO: 13821 - DNA, 22 bp, synthetic construct
  misc_feature 1..22: note = Description of Artificial Sequence: Synthetic Antisense oligonucleotide
  modified_base 1: mod_base = OTHER; note = bicyclic nucleic acid (BNA)
  modified_base 5: mod_base = OTHER; note = bicyclic nucleic acid (BNA)
  modified_base 14: mod_base = OTHER; note = bicyclic nucleic acid (BNA)
  modified_base 22: mod_base = OTHER; note = bicyclic nucleic acid (BNA)
  modified_base 2: mod_base = OTHER; note = 5-methyl
  modified_base 14: mod_base = OTHER; note = 5-methyl
  modified_base 19: mod_base = OTHER; note = 5-methyl
  source 1..22: mol_type = other DNA
tcaaggaagatggcatttctag

SEQ ID NO: 13822 - DNA, 22 bp, synthetic construct
  misc_feature 1..22: note = Description of Artificial Sequence: Synthetic Antisense oligonucleotide
  modified_base 1..2: mod_base = OTHER; note = bicyclic nucleic acid (BNA)
  modified_base 6: mod_base = OTHER; note = bicyclic nucleic acid (BNA)
  modified_base 22: mod_base = OTHER; note = bicyclic nucleic acid (BNA)
  modified_base 2: mod_base = OTHER; note = 5-methyl
  modified_base 14: mod_base = OTHER; note = 5-methyl
  modified_base 19: mod_base = OTHER; note = 5-methyl
  source 1..22: mol_type = other DNA
tcaaggaagatggcatttctag

SEQ ID NO: 13823 - DNA, 22 bp, synthetic construct
  misc_feature 1..22: note = Description of Artificial Sequence: Synthetic Antisense oligonucleotide
  modified_base 1: mod_base = OTHER; note = bicyclic nucleic acid (BNA)
  modified_base 12: mod_base = OTHER; note = bicyclic nucleic acid (BNA)
  modified_base 19: mod_base = OTHER; note = bicyclic nucleic acid (BNA)
  modified_base 22: mod_base = OTHER; note = bicyclic nucleic acid (BNA)
  modified_base 2: mod_base = OTHER; note = 5-methyl
  modified_base 14: mod_base = OTHER; note = 5-methyl
  modified_base 19: mod_base = OTHER; note = 5-methyl
  source 1..22: mol_type = other DNA
tcaaggaagatggcatttctag

SEQ ID NO: 13824 - DNA, 22 bp, synthetic construct
  misc_feature 1..22: note = Description of Artificial Sequence: Synthetic Antisense oligonucleotide
  modified_base 1: mod_base = OTHER; note = bicyclic nucleic acid (BNA)
  modified_base 12: mod_base = OTHER; note = bicyclic nucleic acid (BNA)
  modified_base 14: mod_base = OTHER; note = bicyclic nucleic acid (BNA)
  modified_base 22: mod_base = OTHER; note = bicyclic nucleic acid (BNA)
  modified_base 2: mod_base = OTHER; note = 5-methyl
  modified_base 14: mod_base = OTHER; note = 5-methyl
  modified_base 19: mod_base = OTHER; note = 5-methyl
  source 1..22: mol_type = other DNA
tcaaggaagatggcatttctag

SEQ ID NO: 13825 - DNA, 22 bp, synthetic construct
  misc_feature 1..22: note = Description of Artificial Sequence: Synthetic Antisense oligonucleotide
  modified_base 1: mod_base = OTHER; note = bicyclic nucleic acid (BNA)
  modified_base 6: mod_base = OTHER; note = bicyclic nucleic acid (BNA)
  modified_base 12: mod_base = OTHER; note = bicyclic nucleic acid (BNA)
  modified_base 22: mod_base = OTHER; note = bicyclic nucleic acid (BNA)
  modified_base 2: mod_base = OTHER; note = 5-methyl
  modified_base 14: mod_base = OTHER; note = 5-methyl
  modified_base 19: mod_base = OTHER; note = 5-methyl
  source 1..22: mol_type = other DNA
tcaaggaagatggcatttctag

SEQ ID NO: 13826 - DNA, 22 bp, synthetic construct
  misc_feature 1..22: note = Description of Artificial Sequence: Synthetic Antisense oligonucleotide
  modified_base 1: mod_base = OTHER; note = bicyclic nucleic acid (BNA)
  modified_base 5..6: mod_base = OTHER; note = bicyclic nucleic acid (BNA)
  modified_base 22: mod_base = OTHER; note = bicyclic nucleic acid (BNA)
  modified_base 2: mod_base = OTHER; note = 5-methyl
  modified_base 14: mod_base = OTHER; note = 5-methyl
  modified_base 19: mod_base = OTHER; note = 5-methyl
  source 1..22: mol_type = other DNA
tcaaggaagatggcatttctag

SEQ ID NO: 13827 - DNA, 22 bp, synthetic construct
  misc_feature 1..22: note = Description of Artificial Sequence: Synthetic Antisense oligonucleotide
  modified_base 1..2: mod_base = OTHER; note = bicyclic nucleic acid (BNA)
  modified_base 14: mod_base = OTHER; note = bicyclic nucleic acid (BNA)
  modified_base 22: mod_base = OTHER; note = bicyclic nucleic acid (BNA)
  modified_base 2: mod_base = OTHER; note = 5-methyl
  modified_base 14: mod_base = OTHER; note = 5-methyl
  modified_base 19: mod_base = OTHER; note = 5-methyl
  source 1..22: mol_type = other DNA
tcaaggaagatggcatttctag

SEQ ID NO: 13828 - DNA, 22 bp, synthetic construct
  misc_feature 1..22: note = Description of Artificial Sequence: Synthetic Antisense oligonucleotide
  modified_base 1: mod_base = OTHER; note = bicyclic nucleic acid (BNA)
  modified_base 9: mod_base = OTHER; note = bicyclic nucleic acid (BNA)
  modified_base 12: mod_base = OTHER; note = bicyclic nucleic acid (BNA)
  modified_base 22: mod_base = OTHER; note = bicyclic nucleic acid (BNA)
  modified_base 2: mod_base = OTHER; note = 5-methyl
  modified_base 14: mod_base = OTHER; note = 5-methyl
  modified_base 19: mod_base = OTHER; note = 5-methyl
  source 1..22: mol_type = other DNA
tcaaggaagatggcatttctag

SEQ ID NO: 13829 - DNA, 22 bp, synthetic construct
  misc_feature 1..22: note = Description of Artificial Sequence: Synthetic Antisense oligonucleotide
  modified_base 1..2: mod_base = OTHER; note = bicyclic nucleic acid (BNA)
  modified_base 5: mod_base = OTHER; note = bicyclic nucleic acid (BNA)
  modified_base 22: mod_base = OTHER; note = bicyclic nucleic acid (BNA)
  modified_base 2: mod_base = OTHER; note = 5-methyl
  modified_base 14: mod_base = OTHER; note = 5-methyl
  modified_base 19: mod_base = OTHER; note = 5-methyl
  source 1..22: mol_type = other DNA
tcaaggaagatggcatttctag

SEQ ID NO: 13830 - DNA, 22 bp, synthetic construct
  misc_feature 1..22: note = Description of Artificial Sequence: Synthetic Antisense oligonucleotide
  modified_base 1: mod_base = OTHER; note = bicyclic nucleic acid (BNA)
  modified_base 13: mod_base = OTHER; note = bicyclic nucleic acid (BNA)
  modified_base 19: mod_base = OTHER; note = bicyclic nucleic acid (BNA)
  modified_base 22: mod_base = OTHER; note = bicyclic nucleic acid (BNA)
  modified_base 2: mod_base = OTHER; note = 5-methyl
  modified_base 14: mod_base = OTHER; note = 5-methyl
  modified_base 19: mod_base = OTHER; note = 5-methyl
  source 1..22: mol_type = other DNA
tcaaggaagatggcatttctag

SEQ ID NO: 13831 - DNA, 22 bp, synthetic construct
  misc_feature 1..22: note = Description of Artificial Sequence: Synthetic Antisense oligonucleotide
  modified_base 1: mod_base = OTHER; note = bicyclic nucleic acid (BNA)
  modified_base 12..13: mod_base = OTHER; note = bicyclic nucleic acid (BNA)
  modified_base 22: mod_base = OTHER; note = bicyclic nucleic acid (BNA)
  modified_base 2: mod_base = OTHER; note = 5-methyl
  modified_base 14: mod_base = OTHER; note = 5-methyl
  modified_base 19: mod_base = OTHER; note = 5-methyl
  source 1..22: mol_type = other DNA
tcaaggaagatggcatttctag

SEQ ID NO: 13832 - DNA, 22 bp, synthetic construct
  misc_feature 1..22: note = Description of Artificial Sequence: Synthetic Antisense oligonucleotide
  modified_base 1: mod_base = OTHER; note = bicyclic nucleic acid (BNA)
  modified_base 5: mod_base = OTHER; note = bicyclic nucleic acid (BNA)
  modified_base 12: mod_base = OTHER; note = bicyclic nucleic acid (BNA)
  modified_base 22: mod_base = OTHER; note = bicyclic nucleic acid (BNA)
  modified_base 2: mod_base = OTHER; note = 5-methyl
  modified_base 14: mod_base = OTHER; note = 5-methyl
  modified_base 19: mod_base = OTHER; note = 5-methyl
  source 1..22: mol_type = other DNA
tcaaggaagatggcatttctag

SEQ ID NO: 13833 - DNA, 22 bp, synthetic construct
  misc_feature 1..22: note = Description of Artificial Sequence: Synthetic Antisense oligonucleotide
  modified_base 1..2: mod_base = OTHER; note = bicyclic nucleic acid (BNA)
  modified_base 13: mod_base = OTHER; note = bicyclic nucleic acid (BNA)
  modified_base 22: mod_base = OTHER; note = bicyclic nucleic acid (BNA)
  modified_base 2: mod_base = OTHER; note = 5-methyl
  modified_base 14: mod_base = OTHER; note = 5-methyl
  modified_base 19: mod_base = OTHER; note = 5-methyl
  source 1..22: mol_type = other DNA
tcaaggaagatggcatttctag

SEQ ID NO: 13834 - DNA, 22 bp, synthetic construct
  misc_feature 1..22: note = Description of Artificial Sequence: Synthetic Antisense oligonucleotide
  modified_base 1: mod_base = OTHER; note = bicyclic nucleic acid (BNA)
  modified_base 9: mod_base = OTHER; note = bicyclic nucleic acid (BNA)
  modified_base 13: mod_base = OTHER; note = bicyclic nucleic acid (BNA)
  modified_base 22: mod_base = OTHER; note = bicyclic nucleic acid (BNA)
  modified_base 2: mod_base = OTHER; note = 5-methyl
  modified_base 14: mod_base = OTHER; note = 5-methyl
  modified_base 19: mod_base = OTHER; note = 5-methyl
  source 1..22: mol_type = other DNA
tcaaggaagatggcatttctag

SEQ ID NO: 13835 - DNA, 22 bp, synthetic construct
  misc_feature 1..22: note = Description of Artificial Sequence: Synthetic Antisense oligonucleotide
  modified_base 1..2: mod_base = OTHER; note = bicyclic nucleic acid (BNA)
  modified_base 19: mod_base = OTHER; note = bicyclic nucleic acid (BNA)
  modified_base 22: mod_base = OTHER; note = bicyclic nucleic acid (BNA)
  modified_base 2: mod_base = OTHER; note = 5-methyl
  modified_base 14: mod_base = OTHER; note = 5-methyl
  modified_base 19: mod_base = OTHER; note = 5-methyl
  source 1..22: mol_type = other DNA
tcaaggaagatggcatttctag

SEQ ID NO: 13836 - DNA, 22 bp, synthetic construct
  misc_feature 1..22: note = Description of Artificial Sequence: Synthetic Antisense oligonucleotide
  modified_base 1..2: mod_base = OTHER; note = bicyclic nucleic acid (BNA)
  modified_base 9: mod_base = OTHER; note = bicyclic nucleic acid (BNA)
  modified_base 22: mod_base = OTHER; note = bicyclic nucleic acid (BNA)
  modified_base 2: mod_base = OTHER; note = 5-methyl
  modified_base 14: mod_base = OTHER; note = 5-methyl
  modified_base 19: mod_base = OTHER; note = 5-methyl
  source 1..22: mol_type = other DNA
tcaaggaagatggcatttctag

SEQ ID NO: 13837 - DNA, 22 bp, synthetic construct
  misc_feature 1..22: note = Description of Artificial Sequence: Synthetic Antisense oligonucleotide
  modified_base 1: mod_base = OTHER; note = bicyclic nucleic acid (BNA)
  modified_base 14: mod_base = OTHER; note = bicyclic nucleic acid (BNA)
  modified_base 19: mod_base = OTHER; note = bicyclic nucleic acid (BNA)
  modified_base 22: mod_base = OTHER; note = bicyclic nucleic acid (BNA)
  modified_base 2: mod_base = OTHER; note = 5-methyl
  modified_base 14: mod_base = OTHER; note = 5-methyl
  modified_base 19: mod_base = OTHER; note = 5-methyl
  source 1..22: mol_type = other DNA
tcaaggaagatggcatttctag

SEQ ID NO: 13838 - DNA, 22 bp, synthetic construct
  misc_feature 1..22: note = Description of Artificial Sequence: Synthetic Antisense oligonucleotide
  modified_base 1: mod_base = OTHER; note = bicyclic nucleic acid (BNA)
  modified_base 9: mod_base = OTHER; note = bicyclic nucleic acid (BNA)
  modified_base 19: mod_base = OTHER; note = bicyclic nucleic acid (BNA)
  modified_base 22: mod_base = OTHER; note = bicyclic nucleic acid (BNA)
  modified_base 2: mod_base = OTHER; note = 5-methyl
  modified_base 14: mod_base = OTHER; note = 5-methyl
  modified_base 19: mod_base = OTHER; note = 5-methyl
  source 1..22: mol_type = other DNA
tcaaggaagatggcatttctag

SEQ ID NO: 13839 - RNA, 18 nt, synthetic construct
  misc_feature 1..18: note = Description of Artificial Sequence: Synthetic Antisense oligonucleotide
  modified_base 1..2: mod_base = OTHER; note = bicyclic nucleic acid (BNA)
  modified_base 9: mod_base = OTHER; note = bicyclic nucleic acid (BNA)
  source 1..18: mol_type = other RNA
ggtaagttctgtccaagc

SEQ ID NO: 13840 - RNA, 18 nt, synthetic construct
  misc_feature 1..18: note = Description of Artificial Sequence: Synthetic Antisense oligonucleotide
  modified_base 1..2: mod_base = OTHER; note = bicyclic nucleic acid (BNA)
  modified_base 11: mod_base = OTHER; note = bicyclic nucleic acid (BNA)
  source 1..18: mol_type = other RNA
ggtaagttctgtccaagc

SEQ ID NO: 13841 - RNA, 18 nt, synthetic construct
  misc_feature 1..18: note = Description of Artificial Sequence: Synthetic Antisense oligonucleotide
  modified_base 1..2: mod_base = OTHER; note = bicyclic nucleic acid (BNA)
  modified_base 6: mod_base = OTHER; note = bicyclic nucleic acid (BNA)
  source 1..18: mol_type = other RNA
ggtaagttctgtccaagc

SEQ ID NO: 13842 - RNA, 18 nt, synthetic construct
  misc_feature 1..18: note = Description of Artificial Sequence: Synthetic Antisense oligonucleotide
  modified_base 1..2: mod_base = OTHER; note = bicyclic nucleic acid (BNA)
  modified_base 17: mod_base = OTHER; note = bicyclic nucleic acid (BNA)
  source 1..18: mol_type = other RNA
ggtaagttctgtccaagc

SEQ ID NO: 13843 - RNA, 18 nt, synthetic construct
  misc_feature 1..18: note = Description of Artificial Sequence: Synthetic Antisense oligonucleotide
  modified_base 1..2: mod_base = OTHER; note = bicyclic nucleic acid (BNA)
  modified_base 13: mod_base = OTHER; note = bicyclic nucleic acid (BNA)
  source 1..18: mol_type = other RNA
ggtaagttctgtccaagc

SEQ ID NO: 13844 - RNA, 18 nt, synthetic construct
  misc_feature 1..18: note = Description of Artificial Sequence: Synthetic Antisense oligonucleotide
  modified_base 1..2: mod_base = OTHER; note = bicyclic nucleic acid (BNA)
  modified_base 14: mod_base = OTHER; note = bicyclic nucleic acid (BNA)
  source 1..18: mol_type = other RNA
ggtaagttctgtccaagc

SEQ ID NO: 13845 - DNA, 18 bp, synthetic construct
  misc_feature 1..18: note = Description of Artificial Sequence: Synthetic Antisense oligonucleotide
  misc_feature 1..18: note = Original Sequence: gtaaguucuguccaagcc
  modified_base 1..2: mod_base = OTHER; note = bicyclic nucleic acid (BNA)
  modified_base 16: mod_base = OTHER; note = bicyclic nucleic acid (BNA)
  source 1..18: mol_type = other DNA
  modified_base 6: mod_base = OTHER; note = Uracil
  modified_base 7: mod_base = OTHER; note = Uracil
  modified_base 9: mod_base = OTHER; note = Uracil
  modified_base 11: mod_base = OTHER; note = Uracil
gtaagttctgtccaagcc

SEQ ID NO: 13846 - DNA, 18 bp, synthetic construct
  misc_feature 1..18: note = Description of Artificial Sequence: Synthetic Antisense oligonucleotide
  misc_feature 1..18: note = Original Sequence: gtaaguucuguccaagcc
  modified_base 1..2: mod_base = OTHER; note = bicyclic nucleic acid (BNA)
  modified_base 10: mod_base = OTHER; note = bicyclic nucleic acid (BNA)
  source 1..18: mol_type = other DNA
  modified_base 6: mod_base = OTHER; note = Uracil
  modified_base 7: mod_base = OTHER; note = Uracil
  modified_base 9: mod_base = OTHER; note = Uracil
  modified_base 11: mod_base = OTHER; note = Uracil
gtaagttctgtccaagcc

SEQ ID NO: 13847 - DNA, 18 bp, synthetic construct
  misc_feature 1..18: note = Description of Artificial Sequence: Synthetic Antisense oligonucleotide
  misc_feature 1..18: note = Original Sequence: gtaaguucuguccaagcc
  modified_base 1..2: mod_base = OTHER; note = bicyclic nucleic acid (BNA)
  modified_base 5: mod_base = OTHER; note = bicyclic nucleic acid (BNA)
  source 1..18: mol_type = other DNA
  modified_base 6: mod_base = OTHER; note = Uracil
  modified_base 7: mod_base = OTHER; note = Uracil
  modified_base 9: mod_base = OTHER; note = Uracil
  modified_base 11: mod_base = OTHER; note = Uracil
gtaagttctgtccaagcc

SEQ ID NO: 13848 - DNA, 18 bp, synthetic construct
  misc_feature 1..18: note = Description of Artificial Sequence: Synthetic Antisense oligonucleotide
  misc_feature 1..18: note = Original Sequence: gtaaguucuguccaagcc
  modified_base 1..2: mod_base = OTHER; note = bicyclic nucleic acid (BNA)
  modified_base 17: mod_base = OTHER; note = bicyclic nucleic acid (BNA)
  source 1..18: mol_type = other DNA
  modified_base 6: mod_base = OTHER; note = Uracil
  modified_base 7: mod_base = OTHER; note = Uracil
  modified_base 9: mod_base = OTHER; note = Uracil
  modified_base 11: mod_base = OTHER; note = Uracil
gtaagttctgtccaagcc

SEQ ID NO: 13849 - DNA, 18 bp, synthetic construct
  misc_feature 1..18: note = Description of Artificial Sequence: Synthetic Antisense oligonucleotide
  misc_feature 1..18: note = Original Sequence: gtaaguucuguccaagcc
  modified_base 1..2: mod_base = OTHER; note = bicyclic nucleic acid (BNA)
  modified_base 12: mod_base = OTHER; note = bicyclic nucleic acid (BNA)
  source 1..18: mol_type = other DNA
  modified_base 6: mod_base = OTHER; note = Uracil
  modified_base 7: mod_base = OTHER; note = Uracil
  modified_base 9: mod_base = OTHER; note = Uracil
  modified_base 11: mod_base = OTHER; note = Uracil
gtaagttctgtccaagcc

SEQ ID NO: 13850 - DNA, 18 bp, synthetic construct
  misc_feature 1..18: note = Description of Artificial Sequence: Synthetic Antisense oligonucleotide
  misc_feature 1..18: note = Original Sequence: gtaaguucuguccaagcc
  modified_base 1..2: mod_base = OTHER; note = bicyclic nucleic acid (BNA)
  modified_base 13: mod_base = OTHER; note = bicyclic nucleic acid (BNA)
  source 1..18: mol_type = other DNA
  modified_base 6: mod_base = OTHER; note = Uracil
  modified_base 7: mod_base = OTHER; note = Uracil
  modified_base 9: mod_base = OTHER; note = Uracil
  modified_base 11: mod_base = OTHER; note = Uracil
gtaagttctgtccaagcc

SEQ ID NO: 13851 - DNA, 18 bp, synthetic construct
  misc_feature 1..18: note = Description of Artificial Sequence: Synthetic Antisense oligonucleotide
  misc_feature 1..18: note = Original Sequence: gtaaguucuguccaagcc
  modified_base 1..2: mod_base = OTHER; note = bicyclic nucleic acid (BNA)
  modified_base 8: mod_base = OTHER; note = bicyclic nucleic acid (BNA)
  source 1..18: mol_type = other DNA
  modified_base 6: mod_base = OTHER; note = Uracil
  modified_base 7: mod_base = OTHER; note = Uracil
  modified_base 9: mod_base = OTHER; note = Uracil
  modified_base 11: mod_base = OTHER; note = Uracil
gtaagttctgtccaagcc

SEQ ID NO: 13852 - RNA, 18 nt, synthetic construct
  misc_feature 1..18: note = Description of Artificial Sequence: Synthetic Antisense oligonucleotide
  modified_base 1..2: mod_base = OTHER; note = bicyclic nucleic acid (BNA)
  modified_base 4: mod_base = OTHER; note = bicyclic nucleic acid (BNA)
  source 1..18: mol_type = other RNA
agtcggtaagttctgtcc

SEQ ID NO: 13853 - RNA, 18 nt, synthetic construct
  misc_feature 1..18: note = Description of Artificial Sequence: Synthetic Antisense oligonucleotide
  modified_base 1..2: mod_base = OTHER; note = bicyclic nucleic acid (BNA)
  modified_base 10: mod_base = OTHER; note = bicyclic nucleic acid (BNA)
  source 1..18: mol_type = other RNA
agtcggtaagttctgtcc

SEQ ID NO: 13854 - RNA, 18 nt, synthetic construct
  misc_feature 1..18: note = Description of Artificial Sequence: Synthetic Antisense oligonucleotide
  modified_base 1..2: mod_base = OTHER; note = bicyclic nucleic acid (BNA)
  modified_base 5: mod_base = OTHER; note = bicyclic nucleic acid (BNA)
  source 1..18: mol_type = other RNA
agtcggtaagttctgtcc

SEQ ID NO: 13855 - RNA, 18 nt, synthetic construct
  misc_feature 1..18: note = Description of Artificial Sequence: Synthetic Antisense oligonucleotide
  modified_base 1..2: mod_base = OTHER; note = bicyclic nucleic acid (BNA)
  modified_base 6: mod_base = OTHER; note = bicyclic nucleic acid (BNA)
  source 1..18: mol_type = other RNA
agtcggtaagttctgtcc

SEQ ID NO: 13856 - RNA, 18 nt, synthetic construct
  misc_feature 1..18: note = Description of Artificial Sequence: Synthetic Antisense oligonucleotide
  modified_base 1..2: mod_base = OTHER; note = bicyclic nucleic acid (BNA)
  modified_base 17: mod_base = OTHER; note = bicyclic nucleic acid (BNA)
  source 1..18: mol_type = other RNA
agtcggtaagttctgtcc

SEQ ID NO: 13857 - RNA, 18 nt, synthetic construct
  misc_feature 1..18: note = Description of Artificial Sequence: Synthetic Antisense oligonucleotide
  modified_base 1..2: mod_base = OTHER; note = bicyclic nucleic acid (BNA)
  modified_base 13: mod_base = OTHER; note = bicyclic nucleic acid (BNA)
  source 1..18: mol_type = other RNA
agtcggtaagttctgtcc

SEQ ID NO: 13858 - RNA, 18 nt, synthetic construct
  misc_feature 1..18: note = Description of Artificial Sequence: Synthetic Antisense oligonucleotide
  modified_base 1..2: mod_base = OTHER; note = bicyclic nucleic acid (BNA)
  modified_base 15: mod_base = OTHER; note = bicyclic nucleic acid (BNA)
  source 1..18: mol_type = other RNA
agtcggtaagttctgtcc

SEQ ID NO: 13859 - DNA, 18 bp, synthetic construct
  misc_feature 1..18: note = Description of Artificial Sequence: Synthetic Antisense oligonucleotide
  misc_feature 1..18: note = Original Sequence: ctguccaagcccgguuga
  modified_base 1..3: mod_base = OTHER; note = bicyclic nucleic acid (BNA)
  source 1..18: mol_type = other DNA
  modified_base 4: mod_base = OTHER; note = Uracil
  modified_base 15: mod_base = OTHER; note = Uracil
  modified_base 16: mod_base = OTHER; note = Uracil
ctgtccaagcccggttga

SEQ ID NO: 13860 - DNA, 18 bp, synthetic construct
  misc_feature 1..18: note = Description of Artificial Sequence: Synthetic Antisense oligonucleotide
  misc_feature 1..18: note = Original Sequence: ctguccaagcccgguuga
  modified_base 1..2: mod_base = OTHER; note = bicyclic nucleic acid (BNA)
  modified_base 9: mod_base = OTHER; note = bicyclic nucleic acid (BNA)
  source 1..18: mol_type = other DNA
  modified_base 4: mod_base = OTHER; note = Uracil
  modified_base 15: mod_base = OTHER; note = Uracil
  modified_base 16: mod_base = OTHER; note = Uracil
ctgtccaagcccggttga

SEQ ID NO: 13861 - DNA, 18 bp, synthetic construct
  misc_feature 1..18: note = Description of Artificial Sequence: Synthetic Antisense oligonucleotide
  misc_feature 1..18: note = Original Sequence: ctguccaagcccgguuga
  modified_base 1..2: mod_base = OTHER; note = bicyclic nucleic acid (BNA)
  modified_base 10: mod_base = OTHER; note = bicyclic nucleic acid (BNA)
  source 1..18: mol_type = other DNA
  modified_base 4: mod_base = OTHER; note = Uracil
  modified_base 15: mod_base = OTHER; note = Uracil
  modified_base 16: mod_base = OTHER; note = Uracil
ctgtccaagcccggttga

SEQ ID NO: 13862 - DNA, 18 bp, synthetic construct
  misc_feature 1..18: note = Description of Artificial Sequence: Synthetic Antisense oligonucleotide
  misc_feature 1..18: note = Original Sequence: ctguccaagcccgguuga
  modified_base 1..2: mod_base = OTHER; note = bicyclic nucleic acid (BNA)
  modified_base 5: mod_base = OTHER; note = bicyclic nucleic acid (BNA)
  source 1..18: mol_type = other DNA
  modified_base 4: mod_base = OTHER; note = Uracil
  modified_base 15: mod_base = OTHER; note = Uracil
  modified_base 16: mod_base = OTHER; note = Uracil
ctgtccaagcccggttga

SEQ ID NO: 13863 - DNA, 18 bp, synthetic construct
  misc_feature 1..18: note = Description of Artificial Sequence: Synthetic Antisense oligonucleotide
  misc_feature 1..18: note = Original Sequence: ctguccaagcccgguuga
  modified_base 1..2: mod_base = OTHER; note = bicyclic nucleic acid (BNA)
  modified_base 11: mod_base = OTHER; note = bicyclic nucleic acid (BNA)
  source 1..18: mol_type = other DNA
  modified_base 4: mod_base = OTHER; note = Uracil
  modified_base 15: mod_base = OTHER; note = Uracil
  modified_base 16: mod_base = OTHER; note = Uracil
ctgtccaagcccggttga

SEQ ID NO: 13864 - DNA, 18 bp, synthetic construct
  misc_feature 1..18: note = Description of Artificial Sequence: Synthetic Antisense oligonucleotide
  misc_feature 1..18: note = Original Sequence: ctguccaagcccgguuga
  modified_base 1..2: mod_base = OTHER; note = bicyclic nucleic acid (BNA)
  modified_base 6: mod_base = OTHER; note = bicyclic nucleic acid (BNA)
  source 1..18: mol_type = other DNA
  modified_base 4: mod_base = OTHER; note = Uracil
  modified_base 15: mod_base = OTHER; note = Uracil
  modified_base 16: mod_base = OTHER; note = Uracil
ctgtccaagcccggttga

SEQ ID NO: 13865 - DNA, 18 bp, synthetic construct
  misc_feature 1..18: note = Description of Artificial Sequence: Synthetic Antisense oligonucleotide
  misc_feature 1..18: note = Original Sequence: ctguccaagcccgguuga
  modified_base 1..2: mod_base = OTHER; note = bicyclic nucleic acid (BNA)
  modified_base 17: mod_base = OTHER; note = bicyclic nucleic acid (BNA)
  source 1..18: mol_type = other DNA
  modified_base 4: mod_base = OTHER; note = Uracil
  modified_base 15: mod_base = OTHER; note = Uracil
  modified_base 16: mod_base = OTHER; note = Uracil
ctgtccaagcccggttga

SEQ ID NO: 13866 - DNA, 18 bp, synthetic construct
  misc_feature 1..18: note = Description of Artificial Sequence: Synthetic Antisense oligonucleotide
  misc_feature 1..18: note = Original Sequence: ctguccaagcccgguuga
  modified_base 1..2: mod_base = OTHER; note = bicyclic nucleic acid (BNA)
  modified_base 12: mod_base = OTHER; note = bicyclic nucleic acid (BNA)
  source 1..18: mol_type = other DNA
  modified_base 4: mod_base = OTHER; note = Uracil
  modified_base 15: mod_base = OTHER; note = Uracil
  modified_base 16: mod_base = OTHER; note = Uracil
ctgtccaagcccggttga

SEQ ID NO: 13867 - DNA, 18 bp, synthetic construct
  misc_feature 1..18: note = Description of Artificial Sequence: Synthetic Antisense oligonucleotide
  misc_feature 1..18: note = Original Sequence: ctguccaagcccgguuga
  modified_base 1..2: mod_base = OTHER; note = bicyclic nucleic acid (BNA)
  modified_base 13: mod_base = OTHER; note = bicyclic nucleic acid (BNA)
  source 1..18: mol_type = other DNA
  modified_base 4: mod_base = OTHER; note = Uracil
  modified_base 15: mod_base = OTHER; note = Uracil
  modified_base 16: mod_base = OTHER; note = Uracil
ctgtccaagcccggttga

SEQ ID NO: 13868 - DNA, 18 bp, synthetic construct
  misc_feature 1..18: note = Description of Artificial Sequence: Synthetic Antisense oligonucleotide
  misc_feature 1..18: note = Original Sequence: ctguccaagcccgguuga
  modified_base 1..2: mod_base = OTHER; note = bicyclic nucleic acid (BNA)
  modified_base 14: mod_base = OTHER; note = bicyclic nucleic acid (BNA)
  source 1..18: mol_type = other DNA
  modified_base 4: mod_base = OTHER; note = Uracil
  modified_base 15: mod_base = OTHER; note = Uracil
  modified_base 16: mod_base = OTHER; note = Uracil
ctgtccaagcccggttga

SEQ ID NO: 13869 - RNA, 18 nt, synthetic construct
  misc_feature 1..18: note = Description of Artificial Sequence: Synthetic Antisense oligonucleotide
  modified_base 1..2: mod_base = OTHER; note = bicyclic nucleic acid (BNA)
  modified_base 6: mod_base = OTHER; note = bicyclic nucleic acid (BNA)
  modified_base 11: mod_base = OTHER; note = bicyclic nucleic acid (BNA)
  source 1..18: mol_type = other RNA
ggtaagttctgtccaagc

SEQ ID NO: 13870 - RNA, 18 nt, synthetic construct
  misc_feature 1..18: note = Description of Artificial Sequence: Synthetic Antisense oligonucleotide
  modified_base 1..2: mod_base = OTHER; note = bicyclic nucleic acid (BNA)
  modified_base 9: mod_base = OTHER; note = bicyclic nucleic acid (BNA)
  modified_base 14: mod_base = OTHER; note = bicyclic nucleic acid (BNA)
  source 1..18: mol_type = other RNA
ggtaagttctgtccaagc

SEQ ID NO: 13871 - RNA, 18 nt, synthetic construct
  misc_feature 1..18: note = Description of Artificial Sequence: Synthetic Antisense oligonucleotide
  modified_base 1..2: mod_base = OTHER; note = bicyclic nucleic acid (BNA)
  modified_base 6: mod_base = OTHER; note = bicyclic nucleic acid (BNA)
  modified_base 17: mod_base = OTHER; note = bicyclic nucleic acid (BNA)
  source 1..18: mol_type = other RNA
ggtaagttctgtccaagc

SEQ ID NO: 13872 - RNA, 18 nt, synthetic construct
  misc_feature 1..18: note = Description of Artificial Sequence: Synthetic Antisense oligonucleotide
  modified_base 1..2: mod_base = OTHER; note = bicyclic nucleic acid (BNA)
  modified_base 9: mod_base = OTHER; note = bicyclic nucleic acid (BNA)
  modified_base 13: mod_base = OTHER; note = bicyclic nucleic acid (BNA)
  source 1..18: mol_type = other RNA
ggtaagttctgtccaagc

SEQ ID NO: 13873 - RNA, 18 nt, synthetic construct
  misc_feature 1..18: note = Description of Artificial Sequence: Synthetic Antisense oligonucleotide
  modified_base 1..2: mod_base = OTHER; note = bicyclic nucleic acid (BNA)
  modified_base 13..14: mod_base = OTHER; note = bicyclic nucleic acid (BNA)
  source 1..18: mol_type = other RNA
ggtaagttctgtccaagc

SEQ ID NO: 13874 - RNA, 18 nt, synthetic construct
  misc_feature 1..18: note = Description of Artificial Sequence: Synthetic Antisense oligonucleotide
  modified_base 1..2: mod_base = OTHER; note = bicyclic nucleic acid (BNA)
  modified_base 11: mod_base = OTHER; note = bicyclic nucleic acid (BNA)
  modified_base 17: mod_base = OTHER; note = bicyclic nucleic acid (BNA)
  source 1..18: mol_type = other RNA
ggtaagttctgtccaagc

SEQ ID NO: 13875 - RNA, 18 nt, synthetic construct
  misc_feature 1..18: note = Description of Artificial Sequence: Synthetic Antisense oligonucleotide
  modified_base 1..2: mod_base = OTHER; note = bicyclic nucleic acid (BNA)
  modified_base 11: mod_base = OTHER; note = bicyclic nucleic acid (BNA)
  modified_base 14: mod_base = OTHER; note = bicyclic nucleic acid (BNA)
  source 1..18: mol_type = other RNA
ggtaagttctgtccaagc

SEQ ID NO: 13876 - RNA, 18 nt, synthetic construct
  misc_feature 1..18: note = Description of Artificial Sequence: Synthetic Antisense oligonucleotide
  modified_base 1..2: mod_base = OTHER; note = bicyclic nucleic acid (BNA)
  modified_base 6: mod_base = OTHER; note = bicyclic nucleic acid (BNA)
  modified_base 13: mod_base = OTHER; note = bicyclic nucleic acid (BNA)
  source 1..18: mol_type = other RNA
ggtaagttctgtccaagc

SEQ ID NO: 13877 - RNA, 18 nt, synthetic construct
  misc_feature 1..18: note = Description of Artificial Sequence: Synthetic Antisense oligonucleotide
  modified_base 1..2: mod_base = OTHER; note = bicyclic nucleic acid (BNA)
  modified_base 6: mod_base = OTHER; note = bicyclic nucleic acid (BNA)
  modified_base 14: mod_base = OTHER; note = bicyclic nucleic acid (BNA)
  source 1..18: mol_type = other RNA
ggtaagttctgtccaagc

SEQ ID NO: 13878 - RNA, 18 nt, synthetic construct
  misc_feature 1..18: note = Description of Artificial Sequence: Synthetic Antisense oligonucleotide
  modified_base 1..2: mod_base = OTHER; note = bicyclic nucleic acid (BNA)
  modified_base 14: mod_base = OTHER; note = bicyclic nucleic acid (BNA)
  modified_base 17: mod_base = OTHER; note = bicyclic nucleic acid (BNA)
  source 1..18: mol_type = other RNA
ggtaagttctgtccaagc

SEQ ID NO: 13879 - RNA, 18 nt, synthetic construct
  misc_feature 1..18: note = Description of Artificial Sequence: Synthetic Antisense oligonucleotide
  modified_base 1..2: mod_base = OTHER; note = bicyclic nucleic acid (BNA)
  modified_base 9: mod_base = OTHER; note = bicyclic nucleic acid (BNA)
  modified_base 11: mod_base = OTHER; note = bicyclic nucleic acid (BNA)
  source 1..18: mol_type = other RNA
ggtaagttctgtccaagc

SEQ ID NO: 13880 - RNA, 18 nt, synthetic construct
  misc_feature 1..18: note = Description of Artificial Sequence: Synthetic Antisense oligonucleotide
  modified_base 1..2: mod_base = OTHER; note = bicyclic nucleic acid (BNA)
  modified_base 11: mod_base = OTHER; note = bicyclic nucleic acid (BNA)
  modified_base 13: mod_base = OTHER; note = bicyclic nucleic acid (BNA)
  source 1..18: mol_type = other RNA
ggtaagttctgtccaagc

SEQ ID NO: 13881 - RNA, 18 nt, synthetic construct
  misc_feature 1..18: note = Description of Artificial Sequence: Synthetic Antisense oligonucleotide
  modified_base 1..2: mod_base = OTHER; note = bicyclic nucleic acid (BNA)
  modified_base 13: mod_base = OTHER; note = bicyclic nucleic acid (BNA)
  modified_base 17: mod_base = OTHER; note = bicyclic nucleic acid (BNA)
  source 1..18: mol_type = other RNA
ggtaagttctgtccaagc

SEQ ID NO: 13882 - RNA, 18 nt, synthetic construct
  misc_feature 1..18: note = Description of Artificial Sequence: Synthetic Antisense oligonucleotide
  modified_base 1..2: mod_base = OTHER; note = bicyclic nucleic acid (BNA)
  modified_base 9: mod_base = OTHER; note = bicyclic nucleic acid (BNA)
  modified_base 17: mod_base = OTHER; note = bicyclic nucleic acid (BNA)
  source 1..18: mol_type = other RNA
ggtaagttctgtccaagc

SEQ ID NO: 13883 - RNA, 18 nt, synthetic construct
  misc_feature 1..18: note = Description of Artificial Sequence: Synthetic Antisense oligonucleotide
  modified_base 1..2: mod_base = OTHER; note = bicyclic nucleic acid (BNA)
  modified_base 6: mod_base = OTHER; note = bicyclic nucleic acid (BNA)
  modified_base 9: mod_base = OTHER; note = bicyclic nucleic acid (BNA)
  source 1..18: mol_type = other RNA
ggtaagttctgtccaagc

SEQ ID NO: 13884 - DNA, 18 bp, synthetic construct
  misc_feature 1..18: note = Description of Artificial Sequence: Synthetic Antisense oligonucleotide
  misc_feature 1..18: note = Original Sequence: gtaaguucuguccaagcc
  modified_base 1..2: mod_base = OTHER; note = bicyclic nucleic acid (BNA)
  modified_base 12: mod_base = OTHER; note = bicyclic nucleic acid (BNA)
  modified_base 17: mod_base = OTHER; note = bicyclic nucleic acid (BNA)
  source 1..18: mol_type = other DNA
  modified_base 6: mod_base = OTHER; note = Uracil
  modified_base 7: mod_base = OTHER; note = Uracil
  modified_base 9: mod_base = OTHER; note = Uracil
  modified_base 11: mod_base = OTHER; note = Uracil
gtaagttctgtccaagcc

SEQ ID NO: 13885 - DNA, 18 bp, synthetic construct
  misc_feature 1..18: note = Description of Artificial Sequence: Synthetic Antisense oligonucleotide
  misc_feature 1..18: note = Original Sequence: gtaaguucuguccaagcc
  modified_base 1..2: mod_base = OTHER; note = bicyclic nucleic acid (BNA)
  modified_base 5: mod_base = OTHER; note = bicyclic nucleic acid (BNA)
  modified_base 8: mod_base = OTHER; note = bicyclic nucleic acid (BNA)
  source 1..18: mol_type = other DNA
  modified_base 6: mod_base = OTHER; note = Uracil
  modified_base 7: mod_base = OTHER; note = Uracil
  modified_base 9: mod_base = OTHER; note = Uracil
  modified_base 11: mod_base = OTHER; note = Uracil
gtaagttctgtccaagcc

SEQ ID NO: 13886 - DNA, 18 bp, synthetic construct
  misc_feature 1..18: note = Description of Artificial Sequence: Synthetic Antisense oligonucleotide
  misc_feature 1..18: note = Original Sequence: gtaaguucuguccaagcc
  modified_base 1..2: mod_base = OTHER; note = bicyclic nucleic acid (BNA)
  modified_base 8: mod_base = OTHER; note = bicyclic nucleic acid (BNA)
  modified_base 13: mod_base = OTHER; note = bicyclic nucleic acid (BNA)
  source 1..18: mol_type = other DNA
  modified_base 6: mod_base = OTHER; note = Uracil
  modified_base 7: mod_base = OTHER; note = Uracil
  modified_base 9: mod_base = OTHER; note = Uracil
  modified_base 11: mod_base = OTHER; note = Uracil
gtaagttctgtccaagcc

SEQ ID NO: 13887 - DNA, 18 bp, synthetic construct
  misc_feature 1..18: note = Description of Artificial Sequence: Synthetic Antisense oligonucleotide
  misc_feature 1..18: note = Original Sequence: gtaaguucuguccaagcc
  modified_base 1..2: mod_base = OTHER; note = bicyclic nucleic acid (BNA)
  modified_base 5: mod_base = OTHER; note = bicyclic nucleic acid (BNA)
  modified_base 13: mod_base = OTHER; note = bicyclic nucleic acid (BNA)
  source 1..18: mol_type = other DNA
  modified_base 6: mod_base = OTHER; note = Uracil
  modified_base 7: mod_base = OTHER; note = Uracil
  modified_base 9: mod_base = OTHER; note = Uracil
  modified_base 11: mod_base = OTHER; note = Uracil
gtaagttctgtccaagcc

SEQ ID NO: 13888 - DNA, 18 bp, synthetic construct
  misc_feature 1..18: note = Description of Artificial Sequence: Synthetic Antisense oligonucleotide
  misc_feature 1..18: note = Original Sequence: gtaaguucuguccaagcc
  modified_base 1..2: mod_base = OTHER; note = bicyclic nucleic acid (BNA)
  modified_base 8: mod_base = OTHER; note = bicyclic nucleic acid (BNA)
  modified_base 17: mod_base = OTHER; note = bicyclic nucleic acid (BNA)
  source 1..18: mol_type = other DNA
  modified_base 6: mod_base = OTHER; note = Uracil
  modified_base 7: mod_base = OTHER; note = Uracil
  modified_base 9: mod_base = OTHER; note = Uracil
  modified_base 11: mod_base = OTHER; note = Uracil
gtaagttctgtccaagcc

SEQ ID NO: 13889 - DNA, 18 bp, synthetic construct
  misc_feature 1..18: note = Description of Artificial Sequence: Synthetic Antisense oligonucleotide
  misc_feature 1..18: note = Original Sequence: gtaaguucuguccaagcc
  modified_base 1..2: mod_base = OTHER; note = bicyclic nucleic acid (BNA)
  modified_base 13: mod_base = OTHER; note = bicyclic nucleic acid (BNA)
  modified_base 17: mod_base = OTHER; note = bicyclic nucleic acid (BNA)
  source 1..18: mol_type = other DNA
  modified_base 6: mod_base = OTHER; note = Uracil
  modified_base 7: mod_base = OTHER; note = Uracil
  modified_base 9: mod_base = OTHER; note = Uracil
  modified_base 11: mod_base = OTHER; note = Uracil
gtaagttctgtccaagcc

SEQ ID NO: 13890 - DNA, 18 bp, synthetic construct
  misc_feature 1..18: note = Description of Artificial Sequence: Synthetic Antisense oligonucleotide
  misc_feature 1..18: note = Original Sequence: gtaaguucuguccaagcc
  modified_base 1..2: mod_base = OTHER; note = bicyclic nucleic acid (BNA)
  modified_base 8: mod_base = OTHER; note = bicyclic nucleic acid (BNA)
  modified_base 12: mod_base = OTHER; note = bicyclic nucleic acid (BNA)
  source 1..18: mol_type = other DNA
  modified_base 6: mod_base = OTHER; note = Uracil
  modified_base 7: mod_base = OTHER; note = Uracil
  modified_base 9: mod_base = OTHER; note = Uracil
  modified_base 11: mod_base = OTHER; note = Uracil
gtaagttctgtccaagcc

SEQ ID NO: 13891 - DNA, 18 bp, synthetic construct
  misc_feature 1..18: note = Description of Artificial Sequence: Synthetic Antisense oligonucleotide
  misc_feature 1..18: note = Original Sequence: gtaaguucuguccaagcc
  modified_base 1..2: mod_base = OTHER; note = bicyclic nucleic acid (BNA)
  modified_base 5: mod_base = OTHER; note = bicyclic nucleic acid (BNA)
  modified_base 10: mod_base = OTHER; note = bicyclic nucleic acid (BNA)
  source 1..18: mol_type = other DNA
  modified_base 6: mod_base = OTHER; note = Uracil
  modified_base 7: mod_base = OTHER; note = Uracil
  modified_base 9: mod_base = OTHER; note = Uracil
  modified_base 11: mod_base = OTHER; note = Uracil
gtaagttctgtccaagcc

SEQ ID NO: 13892 - DNA, 18 bp, synthetic construct
  misc_feature 1..18: note = Description of Artificial Sequence: Synthetic Antisense oligonucleotide
  misc_feature 1..18: note = Original Sequence: gtaaguucuguccaagcc
  modified_base 1..2: mod_base = OTHER; note = bicyclic nucleic acid (BNA)
  modified_base 8: mod_base = OTHER; note = bicyclic nucleic acid (BNA)
  modified_base 16: mod_base = OTHER; note = bicyclic nucleic acid (BNA)
  source 1..18: mol_type = other DNA
  modified_base 6: mod_base = OTHER; note = Uracil
  modified_base 7: mod_base = OTHER; note = Uracil
  modified_base 9: mod_base = OTHER; note = Uracil
  modified_base 11: mod_base = OTHER; note = Uracil
gtaagttctgtccaagcc

SEQ ID NO: 13893 - DNA, 18 bp, synthetic construct
  misc_feature 1..18: note = Description of Artificial Sequence: Synthetic Antisense oligonucleotide
  misc_feature 1..18: note = Original Sequence: gtaaguucuguccaagcc
  modified_base 1..2: mod_base = OTHER; note = bicyclic nucleic acid (BNA)
  modified_base 10: mod_base = OTHER; note = bicyclic nucleic acid (BNA)
  modified_base 16: mod_base = OTHER; note = bicyclic nucleic acid (BNA)
  source 1..18: mol_type = other DNA
  modified_base 6: mod_base = OTHER; note = Uracil
  modified_base 7: mod_base = OTHER; note = Uracil
  modified_base 9: mod_base = OTHER; note = Uracil
  modified_base 11: mod_base = OTHER; note = Uracil
gtaagttctgtccaagcc

SEQ ID NO: 13894 - DNA, 18 bp, synthetic construct
  misc_feature 1..18: note = Description of Artificial Sequence: Synthetic Antisense oligonucleotide
  misc_feature 1..18: note = Original Sequence: gtaaguucuguccaagcc
  modified_base 1..2: mod_base = OTHER; note = bicyclic nucleic acid (BNA)
  modified_base 10: mod_base = OTHER; note = bicyclic nucleic acid (BNA)
  modified_base 12: mod_base = OTHER; note = bicyclic nucleic acid (BNA)
  source 1..18: mol_type = other DNA
  modified_base 6: mod_base = OTHER; note = Uracil
  modified_base 7: mod_base = OTHER; note = Uracil
  modified_base 9: mod_base = OTHER; note = Uracil
  modified_base 11: mod_base = OTHER; note = Uracil
gtaagttctgtccaagcc

SEQ ID NO: 13895 - DNA, 18 bp, synthetic construct
  misc_feature 1..18: note = Description of Artificial Sequence: Synthetic Antisense oligonucleotide
  misc_feature 1..18: note = Original Sequence: gtaaguucuguccaagcc
  modified_base 1..2: mod_base = OTHER; note = bicyclic nucleic acid (BNA)
  modified_base 5: mod_base = OTHER; note = bicyclic nucleic acid (BNA)
  modified_base 17: mod_base = OTHER; note = bicyclic nucleic acid (BNA)
  source 1..18: mol_type = other DNA
  modified_base 6: mod_base = OTHER; note = Uracil
  modified_base 7: mod_base = OTHER; note = Uracil
  modified_base 9: mod_base = OTHER; note = Uracil
  modified_base 11: mod_base = OTHER; note = Uracil
gtaagttctgtccaagcc

SEQ ID NO: 13896 - DNA, 18 bp, synthetic construct
  misc_feature 1..18: note = Description of Artificial Sequence: Synthetic Antisense oligonucleotide
  misc_feature 1..18: note = Original Sequence: gtaaguucuguccaagcc
  modified_base 1..2: mod_base = OTHER; note = bicyclic nucleic acid (BNA)
  modified_base 10: mod_base = OTHER; note = bicyclic nucleic acid (BNA)
  modified_base 17: mod_base = OTHER; note = bicyclic nucleic acid (BNA)
  source 1..18: mol_type = other DNA
  modified_base 6: mod_base = OTHER; note = Uracil
  modified_base 7: mod_base = OTHER; note = Uracil
  modified_base 9: mod_base = OTHER; note = Uracil
  modified_base 11: mod_base = OTHER; note = Uracil
gtaagttctgtccaagcc

SEQ ID NO: 13897 - DNA, 18 bp, synthetic construct
  misc_feature 1..18: note = Description of Artificial Sequence: Synthetic Antisense oligonucleotide
  misc_feature 1..18: note = Original Sequence: gtaaguucuguccaagcc
  modified_base 1..2: mod_base = OTHER; note = bicyclic nucleic acid (BNA)
  modified_base 12..13: mod_base = OTHER; note = bicyclic nucleic acid (BNA)
  source 1..18: mol_type = other DNA
  modified_base 6: mod_base = OTHER; note = Uracil
  modified_base 7: mod_base = OTHER; note = Uracil
  modified_base 9: mod_base = OTHER; note = Uracil
  modified_base 11: mod_base = OTHER; note = Uracil
gtaagttctgtccaagcc

SEQ ID NO: 13898 - DNA, 18 bp, synthetic construct
  misc_feature 1..18: note = Description of Artificial Sequence: Synthetic Antisense oligonucleotide
  misc_feature 1..18: note = Original Sequence: gtaaguucuguccaagcc
  modified_base 1..2: mod_base = OTHER; note = bicyclic nucleic acid (BNA)
  modified_base 5: mod_base = OTHER; note = bicyclic nucleic acid (BNA)
  modified_base 12: mod_base = OTHER; note = bicyclic nucleic acid (BNA)
  source 1..18: mol_type = other DNA
  modified_base 6: mod_base = OTHER; note = Uracil
  modified_base 7: mod_base = OTHER; note = Uracil
  modified_base 9: mod_base = OTHER; note = Uracil
  modified_base 11: mod_base = OTHER; note = Uracil
gtaagttctgtccaagcc

SEQ ID NO: 13899 - DNA, 18 bp, synthetic construct
  misc_feature 1..18: note = Description of Artificial Sequence: Synthetic Antisense oligonucleotide
  misc_feature 1..18: note = Original Sequence: gtaaguucuguccaagcc
  modified_base 1..2: mod_base = OTHER; note = bicyclic nucleic acid (BNA)
  modified_base 8: mod_base = OTHER; note = bicyclic nucleic acid (BNA)
  modified_base 10: mod_base = OTHER; note = bicyclic nucleic acid (BNA)
  source 1..18: mol_type = other DNA
  modified_base 6: mod_base = OTHER; note = Uracil
  modified_base 7: mod_base = OTHER; note = Uracil
  modified_base 9: mod_base = OTHER; note = Uracil
  modified_base 11: mod_base = OTHER; note = Uracil
gtaagttctgtccaagcc

SEQ ID NO: 13900 - DNA, 18 bp, synthetic construct
  misc_feature 1..18: note = Description of Artificial Sequence: Synthetic Antisense oligonucleotide
  misc_feature 1..18: note = Original Sequence: gtaaguucuguccaagcc
  modified_base 1..2: mod_base = OTHER; note = bicyclic nucleic acid (BNA)
  modified_base 13: mod_base = OTHER; note = bicyclic nucleic acid (BNA)
  modified_base 16: mod_base = OTHER; note = bicyclic nucleic acid (BNA)
  source 1..18: mol_type = other DNA
  modified_base 6: mod_base = OTHER; note = Uracil
  modified_base 7: mod_base = OTHER; note = Uracil
  modified_base 9: mod_base = OTHER; note = Uracil
  modified_base 11: mod_base = OTHER; note = Uracil
gtaagttctgtccaagcc

SEQ ID NO: 13901 - DNA, 18 bp, synthetic construct
  misc_feature 1..18: note = Description of Artificial Sequence: Synthetic Antisense oligonucleotide
  misc_feature 1..18: note = Original Sequence: gtaaguucuguccaagcc
  modified_base 1..2: mod_base = OTHER; note = bicyclic nucleic acid (BNA)
  modified_base 5: mod_base = OTHER; note = bicyclic nucleic acid (BNA)
  modified_base 16: mod_base = OTHER; note = bicyclic nucleic acid (BNA)
  source 1..18: mol_type = other DNA
  modified_base 6: mod_base = OTHER; note = Uracil
  modified_base 7: mod_base = OTHER; note = Uracil
  modified_base 9: mod_base = OTHER; note = Uracil
  modified_base 11: mod_base = OTHER; note = Uracil
gtaagttctgtccaagcc

SEQ ID NO: 13902 - DNA, 18 bp, synthetic construct
  misc_feature 1..18: note = Description of Artificial Sequence: Synthetic Antisense oligonucleotide
  misc_feature 1..18: note = Original Sequence: gtaaguucuguccaagcc
  modified_base 1..2: mod_base = OTHER; note = bicyclic nucleic acid (BNA)
  modified_base 12: mod_base = OTHER; note = bicyclic nucleic acid (BNA)
  modified_base 16: mod_base = OTHER; note = bicyclic nucleic acid (BNA)
  source 1..18: mol_type = other DNA
  modified_base 6: mod_base = OTHER; note = Uracil
  modified_base 7: mod_base = OTHER; note = Uracil
  modified_base 9: mod_base = OTHER; note = Uracil
  modified_base 11: mod_base = OTHER; note = Uracil
gtaagttctgtccaagcc

SEQ ID NO: 13903 - DNA, 18 bp, synthetic construct
  misc_feature 1..18: note = Description of Artificial Sequence: Synthetic Antisense oligonucleotide
  misc_feature 1..18: note = Original Sequence: gtaaguucuguccaagcc
  modified_base 1..2: mod_base = OTHER; note = bicyclic nucleic acid (BNA)
  modified_base 16..17: mod_base = OTHER; note = bicyclic nucleic acid (BNA)
  source 1..18: mol_type = other DNA
  modified_base 6: mod_base = OTHER; note = Uracil
  modified_base 7: mod_base = OTHER; note = Uracil
  modified_base 9: mod_base = OTHER; note = Uracil
  modified_base 11: mod_base = OTHER; note = Uracil
gtaagttctgtccaagcc

SEQ ID NO: 13904 - DNA, 18 bp, synthetic construct
  misc_feature 1..18: note = Description of Artificial Sequence: Synthetic Antisense oligonucleotide
  misc_feature 1..18: note = Original Sequence: gtaaguucuguccaagcc
  modified_base 1..2: mod_base = OTHER; note = bicyclic nucleic acid (BNA)
  modified_base 10: mod_base = OTHER; note = bicyclic nucleic acid (BNA)
  modified_base 13: mod_base = OTHER; note = bicyclic nucleic acid (BNA)
  source 1..18: mol_type = other DNA
  modified_base 6: mod_base = OTHER; note = Uracil
  modified_base 7: mod_base = OTHER; note = Uracil
  modified_base 9: mod_base = OTHER; note = Uracil
  modified_base 11: mod_base = OTHER; note = Uracil
gtaagttctgtccaagcc

SEQ ID NO: 13905 - RNA, 18 nt, synthetic construct
  misc_feature 1..18: note = Description of Artificial Sequence: Synthetic Antisense oligonucleotide
  modified_base 1..2: mod_base = OTHER; note = bicyclic nucleic acid (BNA)
  modified_base 6: mod_base = OTHER; note = bicyclic nucleic acid (BNA)
  modified_base 10: mod_base = OTHER; note = bicyclic nucleic acid (BNA)
  source 1..18: mol_type = other RNA
agtcggtaagttctgtcc

SEQ ID NO: 13906 - RNA, 18 nt, synthetic construct
  misc_feature 1..18: note = Description of Artificial Sequence: Synthetic Antisense oligonucleotide
  modified_base 1..2: mod_base = OTHER; note = bicyclic nucleic acid (BNA)
  modified_base 5: mod_base = OTHER; note = bicyclic nucleic acid (BNA)
  modified_base 13: mod_base = OTHER; note = bicyclic nucleic acid (BNA)
  source 1..18: mol_type = other RNA
agtcggtaagttctgtcc

SEQ ID NO: 13907 - RNA, 18 nt, synthetic construct
  misc_feature 1..18: note = Description of Artificial Sequence: Synthetic Antisense oligonucleotide
  modified_base 1..2: mod_base = OTHER; note = bicyclic nucleic acid (BNA)
  modified_base 13: mod_base = OTHER; note = bicyclic nucleic acid (BNA)
  modified_base 17: mod_base = OTHER; note = bicyclic nucleic acid (BNA)
  source 1..18: mol_type = other RNA
agtcggtaagttctgtcc

SEQ ID NO: 13908 - RNA, 18 nt, synthetic construct
  misc_feature 1..18: note = Description of Artificial Sequence: Synthetic Antisense oligonucleotide
  modified_base 1..2: mod_base = OTHER; note = bicyclic nucleic acid (BNA)
  modified_base 4: mod_base = OTHER; note = bicyclic nucleic acid (BNA)
  modified_base 15: mod_base = OTHER; note = bicyclic nucleic acid (BNA)
  source 1..18: mol_type = other RNA
agtcggtaagttctgtcc

SEQ ID NO: 13909 - RNA, 18 nt, synthetic construct
  misc_feature 1..18: note = Description of Artificial Sequence: Synthetic Antisense oligonucleotide
  modified_base 1..2: mod_base = OTHER; note = bicyclic nucleic acid (BNA)
  modified_base 5: mod_base = OTHER; note = bicyclic nucleic acid (BNA)
  modified_base 10: mod_base = OTHER; note = bicyclic nucleic acid (BNA)
  source 1..18: mol_type = other RNA
agtcggtaagttctgtcc

SEQ ID NO: 13910 - RNA, 18 nt, synthetic construct
  misc_feature 1..18: note = Description of Artificial Sequence: Synthetic Antisense oligonucleotide
  modified_base 1..2: mod_base = OTHER; note = bicyclic nucleic acid (BNA)
  modified_base 6: mod_base = OTHER; note = bicyclic nucleic acid (BNA)
  modified_base 13: mod_base = OTHER; note = bicyclic nucleic acid (BNA)
  source 1..18: mol_type = other RNA
agtcggtaagttctgtcc

SEQ ID NO: 13911 - RNA, 18 nt, synthetic construct
  misc_feature 1..18: note = Description of Artificial Sequence: Synthetic Antisense oligonucleotide
  modified_base 1..2: mod_base = OTHER; note = bicyclic nucleic acid (BNA)
  modified_base 4: mod_base = OTHER; note = bicyclic nucleic acid (BNA)
  modified_base 17: mod_base = OTHER; note = bicyclic nucleic acid (BNA)
  source 1..18: mol_type = other RNA
agtcggtaagttctgtcc

SEQ ID NO: 13912 - RNA, 18 nt, synthetic construct
  misc_feature 1..18: note = Description of Artificial Sequence: Synthetic Antisense oligonucleotide
  modified_base 1..2: mod_base = OTHER; note = bicyclic nucleic acid (BNA)
  modified_base 10: mod_base = OTHER; note = bicyclic nucleic acid (BNA)
  modified_base 15: mod_base = OTHER; note = bicyclic nucleic acid (BNA)
  source 1..18: mol_type = other RNA
agtcggtaagttctgtcc

SEQ ID NO: 13913 - RNA, 18 nt, synthetic construct
  misc_feature 1..18: note = Description of Artificial Sequence: Synthetic Antisense oligonucleotide
  modified_base 1..2: mod_base = OTHER; note = bicyclic nucleic acid (BNA)
  modified_base 13: mod_base = OTHER; note = bicyclic nucleic acid (BNA)
  modified_base 15: mod_base = OTHER; note = bicyclic nucleic acid (BNA)
  source 1..18: mol_type = other RNA
agtcggtaagttctgtcc

SEQ ID NO: 13914 - RNA, 18 nt, synthetic construct
  misc_feature 1..18: note = Description of Artificial Sequence: Synthetic Antisense oligonucleotide
  modified_base 1..2: mod_base = OTHER; note = bicyclic nucleic acid (BNA)
  modified_base 5..6: mod_base = OTHER; note = bicyclic nucleic acid (BNA)
  source 1..18: mol_type = other RNA
agtcggtaagttctgtcc

SEQ ID NO: 13915 - RNA, 18 nt, synthetic construct
  misc_feature 1..18: note = Description of Artificial Sequence: Synthetic Antisense oligonucleotide
  modified_base 1..2: mod_base = OTHER; note = bicyclic nucleic acid (BNA)
  modified_base 5: mod_base = OTHER; note = bicyclic nucleic acid (BNA)
  modified_base 15: mod_base = OTHER; note = bicyclic nucleic acid (BNA)
  source 1..18: mol_type = other RNA
agtcggtaagttctgtcc

SEQ ID NO: 13916 - RNA, 18 nt, synthetic construct
  misc_feature 1..18: note = Description of Artificial Sequence: Synthetic Antisense oligonucleotide
  modified_base 1..2: mod_base = OTHER; note = bicyclic nucleic acid (BNA)
  modified_base 5: mod_base = OTHER; note = bicyclic nucleic acid (BNA)
  modified_base 17: mod_base = OTHER; note = bicyclic nucleic acid (BNA)
  source 1..18: mol_type = other RNA
agtcggtaagttctgtcc

SEQ ID NO: 13917 - RNA, 18 nt, synthetic construct
  misc_feature 1..18: note = Description of Artificial Sequence: Synthetic Antisense oligonucleotide
  modified_base 1..2: mod_base = OTHER; note = bicyclic nucleic acid (BNA)
  modified_base 10: mod_base = OTHER; note = bicyclic nucleic acid (BNA)
  modified_base 17: mod_base = OTHER; note = bicyclic nucleic acid (BNA)
  source 1..18: mol_type = other RNA
agtcggtaagttctgtcc

SEQ ID NO: 13918 - RNA, 18 nt, synthetic construct
  misc_feature 1..18: note = Description of Artificial Sequence: Synthetic Antisense oligonucleotide
  modified_base 1..2: mod_base = OTHER; note = bicyclic nucleic acid (BNA)
  modified_base 4: mod_base = OTHER; note = bicyclic nucleic acid (BNA)
  modified_base 10: mod_base = OTHER; note = bicyclic nucleic acid (BNA)
  source 1..18: mol_type = other RNA
agtcggtaagttctgtcc

SEQ ID NO: 13919 - RNA, 18 nt, synthetic construct
  misc_feature 1..18: note = Description of Artificial Sequence: Synthetic Antisense oligonucleotide
  modified_base 1..2: mod_base = OTHER; note = bicyclic nucleic acid (BNA)
  modified_base 4: mod_base = OTHER; note = bicyclic nucleic acid (BNA)
  modified_base 6: mod_base = OTHER; note = bicyclic nucleic acid (BNA)
  source 1..18: mol_type = other RNA
agtcggtaagttctgtcc

SEQ ID NO: 13920 - RNA, 18 nt, synthetic construct
  misc_feature 1..18: note = Description of Artificial Sequence: Synthetic Antisense oligonucleotide
  modified_base 1..2: mod_base = OTHER; note = bicyclic nucleic acid (BNA)
  modified_base 4: mod_base = OTHER; note = bicyclic nucleic acid (BNA)
  modified_base 13: mod_base = OTHER; note = bicyclic nucleic acid (BNA)
  source 1..18: mol_type = other RNA
agtcggtaagttctgtcc

SEQ ID NO: 13921 - RNA, 18 nt, synthetic construct
  misc_feature 1..18: note = Description of Artificial Sequence: Synthetic Antisense oligonucleotide
  modified_base 1..2: mod_base = OTHER; note = bicyclic nucleic acid (BNA)
  modified_base 15: mod_base = OTHER; note = bicyclic nucleic acid (BNA)
  modified_base 17: mod_base = OTHER; note = bicyclic nucleic acid (BNA)
  source 1..18: mol_type = other RNA
agtcggtaagttctgtcc

SEQ ID NO: 13922 - RNA, 18 nt, synthetic construct
  misc_feature 1..18: note = Description of Artificial Sequence: Synthetic Antisense oligonucleotide
  modified_base 1..2: mod_base = OTHER; note = bicyclic nucleic acid (BNA)
  modified_base 6: mod_base = OTHER; note = bicyclic nucleic acid (BNA)
  modified_base 17: mod_base = OTHER; note = bicyclic nucleic acid (BNA)
  source 1..18: mol_type = other RNA
agtcggtaagttctgtcc

SEQ ID NO: 13923 - RNA, 18 nt, synthetic construct
  misc_feature 1..18: note = Description of Artificial Sequence: Synthetic Antisense oligonucleotide
  modified_base 1..2: mod_base = OTHER; note = bicyclic nucleic acid (BNA)
  modified_base 6: mod_base = OTHER; note = bicyclic nucleic acid (BNA)
  modified_base 15: mod_base = OTHER; note = bicyclic nucleic acid (BNA)
  source 1..18: mol_type = other RNA
agtcggtaagttctgtcc

SEQ ID NO: 13924 - RNA, 18 nt, synthetic construct
  misc_feature 1..18: note = Description of Artificial Sequence: Synthetic Antisense oligonucleotide
  modified_base 1..2: mod_base = OTHER; note = bicyclic nucleic acid (BNA)
  modified_base 4..5: mod_base = OTHER; note = bicyclic nucleic acid (BNA)
  source 1..18: mol_type = other RNA
agtcggtaagttctgtcc

SEQ ID NO: 13925 - RNA, 18 nt, synthetic construct
  misc_feature 1..18: note = Description of Artificial Sequence: Synthetic Antisense oligonucleotide
  modified_base 1..2: mod_base = OTHER; note = bicyclic nucleic acid (BNA)
  modified_base 10: mod_base = OTHER; note = bicyclic nucleic acid (BNA)
  modified_base 13: mod_base = OTHER; note = bicyclic nucleic acid (BNA)
  source 1..18: mol_type = other RNA
agtcggtaagttctgtcc

SEQ ID NO: 13926 - DNA, 18 bp, synthetic construct
  misc_feature 1..18: note = Description of Artificial Sequence: Synthetic Antisense oligonucleotide
  misc_feature 1..18: note = Original Sequence: ctguccaagcccgguuga
  modified_base 1..2: mod_base = OTHER; note = bicyclic nucleic acid (BNA)
  modified_base 12: mod_base = OTHER; note = bicyclic nucleic acid (BNA)
  modified_base 17: mod_base = OTHER; note = bicyclic nucleic acid (BNA)
  source 1..18: mol_type = other DNA
  modified_base 4: mod_base = OTHER; note = Uracil
  modified_base 15: mod_base = OTHER; note = Uracil
  modified_base 16: mod_base = OTHER; note = Uracil
ctgtccaagcccggttga

SEQ ID NO: 13927 - DNA, 18 bp, synthetic construct
  misc_feature 1..18: note = Description of Artificial Sequence: Synthetic Antisense oligonucleotide
  misc_feature 1..18: note = Original Sequence: ctguccaagcccgguuga
  modified_base 1..2: mod_base = OTHER; note = bicyclic nucleic acid (BNA)
  modified_base 6: mod_base = OTHER; note = bicyclic nucleic acid (BNA)
  modified_base 10: mod_base = OTHER; note = bicyclic nucleic acid (BNA)
  source 1..18: mol_type = other DNA
  modified_base 4: mod_base = OTHER; note = Uracil
  modified_base 15: mod_base = OTHER; note = Uracil
  modified_base 16: mod_base = OTHER; note = Uracil
ctgtccaagcccggttga

SEQ ID NO: 13928 - DNA, 18 bp, synthetic construct
  misc_feature 1..18: note = Description of Artificial Sequence: Synthetic Antisense oligonucleotide
  misc_feature 1..18: note = Original Sequence: ctguccaagcccgguuga
  modified_base 1..2: mod_base = OTHER; note = bicyclic nucleic acid (BNA)
  modified_base 9: mod_base = OTHER; note = bicyclic nucleic acid (BNA)
  modified_base 14: mod_base = OTHER; note = bicyclic nucleic acid (BNA)
  source 1..18: mol_type = other DNA
  modified_base 4: mod_base = OTHER; note = Uracil
  modified_base 15: mod_base = OTHER; note = Uracil
  modified_base 16: mod_base = OTHER; note = Uracil
ctgtccaagcccggttga

SEQ ID NO: 13929 - DNA, 18 bp, synthetic construct
  misc_feature 1..18: note = Description of Artificial Sequence: Synthetic Antisense oligonucleotide
  misc_feature 1..18: note = Original Sequence: ctguccaagcccgguuga
  modified_base 1..2: mod_base = OTHER; note = bicyclic nucleic acid (BNA)
  modified_base 11..12: mod_base = OTHER; note = bicyclic nucleic acid (BNA)
  source 1..18: mol_type = other DNA
  modified_base 4: mod_base = OTHER; note = Uracil
  modified_base 15: mod_base = OTHER; note = Uracil
  modified_base 16: mod_base = OTHER; note = Uracil
ctgtccaagcccggttga

SEQ ID NO: 13930 - DNA, 18 bp, synthetic construct
  misc_feature 1..18: note = Description of Artificial Sequence: Synthetic Antisense oligonucleotide
  misc_feature 1..18: note = Original Sequence: ctguccaagcccgguuga
  modified_base 1..2: mod_base = OTHER; note = bicyclic nucleic acid (BNA)
  modified_base 5: mod_base = OTHER; note = bicyclic nucleic acid (BNA)
  modified_base 9: mod_base = OTHER; note = bicyclic nucleic acid (BNA)
  source 1..18: mol_type = other DNA
  modified_base 4: mod_base = OTHER; note = Uracil
  modified_base 15: mod_base = OTHER; note = Uracil
  modified_base 16: mod_base = OTHER; note = Uracil
ctgtccaagcccggttga

SEQ ID NO: 13931 - DNA, 18 bp, synthetic construct
  misc_feature 1..18: note = Description of Artificial Sequence: Synthetic Antisense oligonucleotide
  misc_feature 1..18: note = Original Sequence: ctguccaagcccgguuga
  modified_base 1..3: mod_base = OTHER; note = bicyclic nucleic acid (BNA)
  modified_base 9: mod_base = OTHER; note = bicyclic nucleic acid (BNA)
  source 1..18: mol_type = other DNA
  modified_base 4: mod_base = OTHER; note = Uracil
  modified_base 15: mod_base = OTHER; note = Uracil
  modified_base 16: mod_base = OTHER; note = Uracil
ctgtccaagcccggttga

SEQ ID NO: 13932 - DNA, 18 bp, synthetic construct
  misc_feature 1..18: note = Description of Artificial Sequence: Synthetic Antisense oligonucleotide
  misc_feature 1..18: note = Original Sequence: ctguccaagcccgguuga
  modified_base 1..2: mod_base = OTHER; note = bicyclic nucleic acid (BNA)
  modified_base 6: mod_base = OTHER; note = bicyclic nucleic acid (BNA)
  modified_base 14: mod_base = OTHER; note = bicyclic nucleic acid (BNA)
  source 1..18: mol_type = other DNA
  modified_base 4: mod_base = OTHER; note = Uracil
  modified_base 15: mod_base = OTHER; note = Uracil
  modified_base 16: mod_base = OTHER; note = Uracil
ctgtccaagcccggttga

SEQ ID NO: 13933 - DNA, 18 bp, synthetic construct
  misc_feature 1..18: note = Description of Artificial Sequence: Synthetic Antisense oligonucleotide
  misc_feature 1..18: note = Original Sequence: ctguccaagcccgguuga
  modified_base 1..2: mod_base = OTHER; note = bicyclic nucleic acid (BNA)
  modified_base 9..10: mod_base = OTHER; note = bicyclic nucleic acid (BNA)
  source 1..18: mol_type = other DNA
  modified_base 4: mod_base = OTHER; note = Uracil
  modified_base 15: mod_base = OTHER; note = Uracil
  modified_base 16: mod_base = OTHER; note = Uracil
ctgtccaagcccggttga

SEQ ID NO: 13934 - DNA, 18 bp, synthetic construct
  misc_feature 1..18: note = Description of Artificial Sequence: Synthetic Antisense oligonucleotide
  misc_feature 1..18: note = Original Sequence: ctguccaagcccgguuga
  modified_base 1..2: mod_base = OTHER; note = bicyclic nucleic acid (BNA)
  modified_base 5: mod_base = OTHER; note = bicyclic nucleic acid (BNA)
  modified_base 13: mod_base = OTHER; note = bicyclic nucleic acid (BNA)
  source 1..18: mol_type = other DNA
  modified_base 4: mod_base = OTHER; note = Uracil
  modified_base 15: mod_base = OTHER; note = Uracil
  modified_base 16: mod_base = OTHER; note = Uracil
ctgtccaagcccggttga

SEQ ID NO: 13935 - DNA, 18 bp, synthetic construct
  misc_feature 1..18: note = Description of Artificial Sequence: Synthetic Antisense oligonucleotide
  misc_feature 1..18: note = Original Sequence: ctguccaagcccgguuga
  modified_base 1..3: mod_base = OTHER; note = bicyclic nucleic acid (BNA)
  modified_base 13: mod_base = OTHER; note = bicyclic nucleic acid (BNA)
  source 1..18: mol_type = other DNA
  modified_base 4: mod_base = OTHER; note = Uracil
  modified_base 15: mod_base = OTHER; note = Uracil
  modified_base 16: mod_base = OTHER; note = Uracil
ctgtccaagcccggttga

SEQ ID NO: 13936 - DNA, 18 bp, synthetic construct
  misc_feature 1..18: note = Description of Artificial Sequence: Synthetic Antisense oligonucleotide
  misc_feature 1..18: note = Original Sequence: ctguccaagcccgguuga
  modified_base 1..2: mod_base = OTHER; note = bicyclic nucleic acid (BNA)
  modified_base 13: mod_base = OTHER; note = bicyclic nucleic acid (BNA)
  modified_base 17: mod_base = OTHER; note = bicyclic nucleic acid (BNA)
  source 1..18: mol_type = other DNA
  modified_base 4: mod_base = OTHER; note = Uracil
  modified_base 15: mod_base = OTHER; note = Uracil
  modified_base 16: mod_base = OTHER; note = Uracil
ctgtccaagcccggttga

SEQ ID NO: 13937 - DNA, 18 bp, synthetic construct
  misc_feature 1..18: note = Description of Artificial Sequence: Synthetic Antisense oligonucleotide
  misc_feature 1..18: note = Original Sequence: ctguccaagcccgguuga
  modified_base 1..3: mod_base = OTHER; note = bicyclic nucleic acid (BNA)
  modified_base 6: mod_base = OTHER; note = bicyclic nucleic acid (BNA)
  source 1..18: mol_type = other DNA
  modified_base 4: mod_base = OTHER; note = Uracil
  modified_base 15: mod_base = OTHER; note = Uracil
  modified_base 16: mod_base = OTHER; note = Uracil
ctgtccaagcccggttga

SEQ ID NO: 13938 - DNA, 18 bp, synthetic construct
  misc_feature 1..18: note = Description of Artificial Sequence: Synthetic Antisense oligonucleotide
  misc_feature 1..18: note = Original Sequence: ctguccaagcccgguuga
  modified_base 1..2: mod_base = OTHER; note = bicyclic nucleic acid (BNA)
  modified_base 6: mod_base = OTHER; note = bicyclic nucleic acid (BNA)
  modified_base 9: mod_base = OTHER; note = bicyclic nucleic acid (BNA)
  source 1..18: mol_type = other DNA
  modified_base 4: mod_base = OTHER; note = Uracil
  modified_base 15: mod_base = OTHER; note = Uracil
  modified_base 16: mod_base = OTHER; note = Uracil
ctgtccaagcccggttga

SEQ ID NO: 13939 - DNA, 18 bp, synthetic construct
  misc_feature 1..18: note = Description of Artificial Sequence: Synthetic Antisense oligonucleotide
  misc_feature 1..18: note = Original Sequence: ctguccaagcccgguuga
  modified_base 1..2: mod_base = OTHER; note = bicyclic nucleic acid (BNA)
  modified_base 5: mod_base = OTHER; note = bicyclic nucleic acid (BNA)
  modified_base 10: mod_base = OTHER; note = bicyclic nucleic acid (BNA)
  source 1..18: mol_type = other DNA
  modified_base 4: mod_base = OTHER; note = Uracil
  modified_base 15: mod_base = OTHER; note = Uracil
  modified_base 16: mod_base = OTHER; note = Uracil
ctgtccaagcccggttga

SEQ ID NO: 13940 - DNA, 18 bp, synthetic construct
  misc_feature 1..18: note = Description of Artificial Sequence: Synthetic Antisense oligonucleotide
  misc_feature 1..18: note = Original Sequence: ctguccaagcccgguuga
  modified_base 1..3: mod_base = OTHER; note = bicyclic nucleic acid (BNA)
  modified_base 10: mod_base = OTHER; note = bicyclic nucleic acid (BNA)
  source 1..18: mol_type = other DNA
  modified_base 4: mod_base = OTHER; note = Uracil
  modified_base 15: mod_base = OTHER; note = Uracil
  modified_base 16: mod_base = OTHER; note = Uracil
ctgtccaagcccggttga

SEQ ID NO: 13941 - DNA, 18 bp, synthetic construct
  misc_feature 1..18: note = Description of Artificial Sequence: Synthetic Antisense oligonucleotide
  misc_feature 1..18: note = Original Sequence: ctguccaagcccgguuga
  modified_base 1..2: mod_base = OTHER; note = bicyclic nucleic acid (BNA)
  modified_base 13..14: mod_base = OTHER; note = bicyclic nucleic acid (BNA)
  source 1..18: mol_type = other DNA
  modified_base 4: mod_base = OTHER; note = Uracil
  modified_base 15: mod_base = OTHER; note = Uracil
  modified_base 16: mod_base = OTHER; note = Uracil
ctgtccaagcccggttga

SEQ ID NO: 13942 - DNA, 18 bp, synthetic construct
  misc_feature 1..18: note = Description of Artificial Sequence: Synthetic Antisense oligonucleotide
  misc_feature 1..18: note = Original Sequence: ctguccaagcccgguuga
  modified_base 1..2: mod_base = OTHER; note = bicyclic nucleic acid (BNA)
  modified_base 6: mod_base = OTHER; note = bicyclic nucleic acid (BNA)
  modified_base 13: mod_base = OTHER; note = bicyclic nucleic acid (BNA)
  source 1..18: mol_type = other DNA
  modified_base 4: mod_base = OTHER; note = Uracil
  modified_base 15: mod_base = OTHER; note = Uracil
  modified_base 16: mod_base = OTHER; note = Uracil
ctgtccaagcccggttga

SEQ ID NO: 13943 - DNA, 18 bp, synthetic construct
  misc_feature 1..18: note = Description of Artificial Sequence: Synthetic Antisense oligonucleotide
  misc_feature 1..18: note = Original Sequence: ctguccaagcccgguuga
  modified_base 1..2: mod_base = OTHER; note = bicyclic nucleic acid (BNA)
  modified_base 9: mod_base = OTHER; note = bicyclic nucleic acid (BNA)
  modified_base 11: mod_base = OTHER; note = bicyclic nucleic acid (BNA)
  source 1..18: mol_type = other DNA
  modified_base 4: mod_base = OTHER; note = Uracil
  modified_base 15: mod_base = OTHER; note = Uracil
  modified_base 16: mod_base = OTHER; note = Uracil
ctgtccaagcccggttga

SEQ ID NO: 13944 - DNA, 18 bp, synthetic construct
  misc_feature 1..18: note = Description of Artificial Sequence: Synthetic Antisense oligonucleotide
  misc_feature 1..18: note = Original Sequence: ctguccaagcccgguuga
  modified_base 1..2: mod_base = OTHER; note = bicyclic nucleic acid (BNA)
  modified_base 14: mod_base = OTHER; note = bicyclic nucleic acid (BNA)
  modified_base 17: mod_base = OTHER; note = bicyclic nucleic acid (BNA)
  source 1..18: mol_type = other DNA
  modified_base 4: mod_base = OTHER; note = Uracil
  modified_base 15: mod_base = OTHER; note = Uracil
  modified_base 16: mod_base = OTHER; note = Uracil
ctgtccaagcccggttga

SEQ ID NO: 13945 - DNA, 18 bp, synthetic construct
  misc_feature 1..18: note = Description of Artificial Sequence: Synthetic Antisense oligonucleotide
  misc_feature 1..18: note = Original Sequence: ctguccaagcccgguuga
  modified_base 1..2: mod_base = OTHER; note = bicyclic nucleic acid (BNA)
  modified_base 11: mod_base = OTHER; note = bicyclic nucleic acid (BNA)
  modified_base 13: mod_base = OTHER; note = bicyclic nucleic acid (BNA)
  source 1..18: mol_type = other DNA
  modified_base 4: mod_base = OTHER; note = Uracil
  modified_base 15: mod_base = OTHER; note = Uracil
  modified_base 16: mod_base = OTHER; note = Uracil
ctgtccaagcccggttga

SEQ ID NO: 13946 - DNA, 18 bp, synthetic construct
  misc_feature 1..18: note = Description of Artificial Sequence: Synthetic Antisense oligonucleotide
  misc_feature 1..18: note = Original Sequence: ctguccaagcccgguuga
  modified_base 1..2: mod_base = OTHER; note = bicyclic nucleic acid (BNA)
  modified_base 5: mod_base = OTHER; note = bicyclic nucleic acid (BNA)
  modified_base 14: mod_base = OTHER; note = bicyclic nucleic acid (BNA)
  source 1..18: mol_type = other DNA
  modified_base 4: mod_base = OTHER; note = Uracil
  modified_base 15: mod_base = OTHER; note = Uracil
  modified_base 16: mod_base = OTHER; note = Uracil
ctgtccaagcccggttga

SEQ ID NO: 13947 - DNA, 18 bp, synthetic construct
  misc_feature 1..18: note = Description of Artificial Sequence: Synthetic Antisense oligonucleotide
  misc_feature 1..18: note = Original Sequence: ctguccaagcccgguuga
  modified_base 1..3: mod_base = OTHER; note = bicyclic nucleic acid (BNA)
  modified_base 14: mod_base = OTHER; note = bicyclic nucleic acid (BNA)
  source 1..18: mol_type = other DNA
  modified_base 4: mod_base = OTHER; note = Uracil
  modified_base 15: mod_base = OTHER; note = Uracil
  modified_base 16: mod_base = OTHER; note = Uracil
ctgtccaagcccggttga

SEQ ID NO: 13948 - DNA, 18 bp, synthetic construct
  misc_feature 1..18: note = Description of Artificial Sequence: Synthetic Antisense oligonucleotide
  misc_feature 1..18: note = Original Sequence: ctguccaagcccgguuga
  modified_base 1..2: mod_base = OTHER; note = bicyclic nucleic acid (BNA)
  modified_base 10: mod_base = OTHER; note = bicyclic nucleic acid (BNA)
  modified_base 12: mod_base = OTHER; note = bicyclic nucleic acid (BNA)
  source 1..18: mol_type = other DNA
  modified_base 4: mod_base = OTHER; note = Uracil
  modified_base 15: mod_base = OTHER; note = Uracil
  modified_base 16: mod_base = OTHER; note = Uracil
ctgtccaagcccggttga

SEQ ID NO: 13949 - DNA, 18 bp, synthetic construct
  misc_feature 1..18: note = Description of Artificial Sequence: Synthetic Antisense oligonucleotide
  misc_feature 1..18: note = Original Sequence: ctguccaagcccgguuga
  modified_base 1..2: mod_base = OTHER; note = bicyclic nucleic acid (BNA)
  modified_base 9: mod_base = OTHER; note = bicyclic nucleic acid (BNA)
  modified_base 17: mod_base = OTHER; note = bicyclic nucleic acid (BNA)
  source 1..18: mol_type = other DNA
  modified_base 4: mod_base = OTHER; note = Uracil
  modified_base 15: mod_base = OTHER; note = Uracil
  modified_base 16: mod_base = OTHER; note = Uracil
ctgtccaagcccggttga

SEQ ID NO: 13950 - DNA, 18 bp, synthetic construct
  misc_feature 1..18: note = Description of Artificial Sequence: Synthetic Antisense oligonucleotide
  misc_feature 1..18: note = Original Sequence: ctguccaagcccgguuga
  modified_base 1..2: mod_base = OTHER; note = bicyclic nucleic acid (BNA)
  modified_base 12: mod_base = OTHER; note = bicyclic nucleic acid (BNA)
  modified_base 14: mod_base = OTHER; note = bicyclic nucleic acid (BNA)
  source 1..18: mol_type = other DNA
  modified_base 4: mod_base = OTHER; note = Uracil
  modified_base 15: mod_base = OTHER; note = Uracil
  modified_base 16: mod_base = OTHER; note = Uracil
ctgtccaagcccggttga

SEQ ID NO: 13951 - DNA, 18 bp, synthetic construct
  misc_feature 1..18: note = Description of Artificial Sequence: Synthetic Antisense oligonucleotide
  misc_feature 1..18: note = Original Sequence: ctguccaagcccgguuga
  modified_base 1..2: mod_base = OTHER; note = bicyclic nucleic acid (BNA)
  modified_base 5: mod_base = OTHER; note = bicyclic nucleic acid (BNA)
  modified_base 11: mod_base = OTHER; note = bicyclic nucleic acid (BNA)
  source 1..18: mol_type = other DNA
  modified_base 4: mod_base = OTHER; note = Uracil
  modified_base 15: mod_base = OTHER; note = Uracil
  modified_base 16: mod_base = OTHER; note = Uracil
ctgtccaagcccggttga

SEQ ID NO: 13952 - DNA, 18 bp, synthetic construct
  misc_feature 1..18: note = Description of Artificial Sequence: Synthetic Antisense oligonucleotide
  misc_feature 1..18: note = Original Sequence: ctguccaagcccgguuga
  modified_base 1..3: mod_base = OTHER; note = bicyclic nucleic acid (BNA)
  modified_base 17: mod_base = OTHER; note = bicyclic nucleic acid (BNA)
  source 1..18: mol_type = other DNA
  modified_base 4: mod_base = OTHER; note = Uracil
  modified_base 15: mod_base = OTHER; note = Uracil
  modified_base 16: mod_base = OTHER; note = Uracil
ctgtccaagcccggttga

SEQ ID NO: 13953 - DNA, 18 bp, synthetic construct
  misc_feature 1..18: note = Description of Artificial Sequence: Synthetic Antisense oligonucleotide
  misc_feature 1..18: note = Original Sequence: ctguccaagcccgguuga
  modified_base 1..2: mod_base = OTHER; note = bicyclic nucleic acid (BNA)
  modified_base 6: mod_base = OTHER; note = bicyclic nucleic acid (BNA)
  modified_base 12: mod_base = OTHER; note = bicyclic nucleic acid (BNA)
  source 1..18: mol_type = other DNA
  modified_base 4: mod_base = OTHER; note = Uracil
  modified_base 15: mod_base = OTHER; note = Uracil
  modified_base 16: mod_base = OTHER; note = Uracil
ctgtccaagcccggttga

SEQ ID NO: 13954 - DNA, 18 bp, synthetic construct
  misc_feature 1..18: note = Description of Artificial Sequence: Synthetic Antisense oligonucleotide
  misc_feature 1..18: note = Original Sequence: ctguccaagcccgguuga
  modified_base 1..2: mod_base = OTHER; note = bicyclic nucleic acid (BNA)
  modified_base 5..6: mod_base = OTHER; note = bicyclic nucleic acid (BNA)
  source 1..18: mol_type = other DNA
  modified_base 4: mod_base = OTHER; note = Uracil
  modified_base 15: mod_base = OTHER; note = Uracil
  modified_base 16: mod_base = OTHER; note = Uracil
ctgtccaagcccggttga

SEQ ID NO: 13955 - DNA, 18 bp, synthetic construct
  misc_feature 1..18: note = Description of Artificial Sequence: Synthetic Antisense oligonucleotide
  misc_feature 1..18: note = Original Sequence: ctguccaagcccgguuga
  modified_base 1..2: mod_base = OTHER; note = bicyclic nucleic acid (BNA)
  modified_base 11: mod_base = OTHER; note = bicyclic nucleic acid (BNA)
  modified_base 14: mod_base = OTHER; note = bicyclic nucleic acid (BNA)
  source 1..18: mol_type = other DNA
  modified_base 4: mod_base = OTHER; note = Uracil
  modified_base 15: mod_base = OTHER; note = Uracil
  modified_base 16: mod_base = OTHER; note = Uracil
ctgtccaagcccggttga

SEQ ID NO: 13956 - DNA, 18 bp, synthetic construct
  misc_feature 1..18: note = Description of Artificial Sequence: Synthetic Antisense oligonucleotide
  misc_feature 1..18: note = Original Sequence: ctguccaagcccgguuga
  modified_base 1..2: mod_base = OTHER; note = bicyclic nucleic acid (BNA)
  modified_base 9: mod_base = OTHER; note = bicyclic nucleic acid (BNA)
  modified_base 12: mod_base = OTHER; note = bicyclic nucleic acid (BNA)
  source 1..18: mol_type = other DNA
  modified_base 4: mod_base = OTHER; note = Uracil
  modified_base 15: mod_base = OTHER; note = Uracil
  modified_base 16: mod_base = OTHER; note = Uracil
ctgtccaagcccggttga

SEQ ID NO: 13957 - DNA, 18 bp, synthetic construct
  misc_feature 1..18: note = Description of Artificial Sequence: Synthetic Antisense oligonucleotide
  misc_feature 1..18: note = Original Sequence: ctguccaagcccgguuga
  modified_base 1..2: mod_base = OTHER; note = bicyclic nucleic acid (BNA)
  modified_base 5: mod_base = OTHER; note = bicyclic nucleic acid (BNA)
  modified_base 17: mod_base = OTHER; note = bicyclic nucleic acid (BNA)
  source 1..18: mol_type = other DNA
  modified_base 4: mod_base = OTHER; note = Uracil
  modified_base 15: mod_base = OTHER; note = Uracil
  modified_base 16: mod_base = OTHER; note = Uracil
ctgtccaagcccggttga

SEQ ID NO: 13958 - DNA, 18 bp, synthetic construct
  misc_feature 1..18: note = Description of Artificial Sequence: Synthetic Antisense oligonucleotide
  misc_feature 1..18: note = Original Sequence: ctguccaagcccgguuga
  modified_base 1..3: mod_base = OTHER; note = bicyclic nucleic acid (BNA)
  modified_base 11: mod_base = OTHER; note = bicyclic nucleic acid (BNA)
  source 1..18: mol_type = other DNA
  modified_base 4: mod_base = OTHER; note = Uracil
  modified_base 15: mod_base = OTHER; note = Uracil
  modified_base 16: mod_base = OTHER; note = Uracil
ctgtccaagcccggttga

SEQ ID NO: 13959 - DNA, 18 bp, synthetic construct
  misc_feature 1..18: note = Description of Artificial Sequence: Synthetic Antisense oligonucleotide
  misc_feature 1..18: note = Original Sequence: ctguccaagcccgguuga
  modified_base 1..2: mod_base = OTHER; note = bicyclic nucleic acid (BNA)
  modified_base 10..11: mod_base = OTHER; note = bicyclic nucleic acid (BNA)
  source 1..18: mol_type = other DNA
  modified_base 4: mod_base = OTHER; note = Uracil
  modified_base 15: mod_base = OTHER; note = Uracil
  modified_base 16: mod_base = OTHER; note = Uracil
ctgtccaagcccggttga

SEQ ID NO: 13960 - DNA, 18 bp, synthetic construct
  misc_feature 1..18: note = Description of Artificial Sequence: Synthetic Antisense oligonucleotide
  misc_feature 1..18: note = Original Sequence: ctguccaagcccgguuga
  modified_base 1..2: mod_base = OTHER; note = bicyclic nucleic acid (BNA)
  modified_base 10: mod_base = OTHER; note = bicyclic nucleic acid (BNA)
  modified_base 17: mod_base = OTHER; note = bicyclic nucleic acid (BNA)
  source 1..18: mol_type = other DNA
  modified_base 4: mod_base = OTHER; note = Uracil
  modified_base 15: mod_base = OTHER; note = Uracil
  modified_base 16: mod_base = OTHER; note = Uracil
ctgtccaagcccggttga

SEQ ID NO: 13961 - DNA, 18 bp, synthetic construct
  misc_feature 1..18: note = Description of Artificial Sequence: Synthetic Antisense oligonucleotide
  misc_feature 1..18: note = Original Sequence: ctguccaagcccgguuga
  modified_base 1..2: mod_base = OTHER; note = bicyclic nucleic acid (BNA)
  modified_base 12..13: mod_base = OTHER; note = bicyclic nucleic acid (BNA)
  source 1..18: mol_type = other DNA
  modified_base 4: mod_base = OTHER; note = Uracil
  modified_base 15: mod_base = OTHER; note = Uracil
  modified_base 16: mod_base = OTHER; note = Uracil
ctgtccaagcccggttga

SEQ ID NO: 13962 - DNA, 18 bp, synthetic construct
  misc_feature 1..18: note = Description of Artificial Sequence: Synthetic Antisense oligonucleotide
  misc_feature 1..18: note = Original Sequence: ctguccaagcccgguuga
  modified_base 1..2: mod_base = OTHER; note = bicyclic nucleic acid (BNA)
  modified_base 5: mod_base = OTHER; note = bicyclic nucleic acid (BNA)
  modified_base 12: mod_base = OTHER; note = bicyclic nucleic acid (BNA)
  source 1..18: mol_type = other DNA
  modified_base 4: mod_base = OTHER; note = Uracil
  modified_base 15: mod_base = OTHER; note = Uracil
  modified_base 16: mod_base = OTHER; note = Uracil
ctgtccaagcccggttga

SEQ ID NO: 13963 - DNA, 18 bp, synthetic construct
  misc_feature 1..18: note = Description of Artificial Sequence: Synthetic Antisense oligonucleotide
  misc_feature 1..18: note = Original Sequence: ctguccaagcccgguuga
  modified_base 1..2: mod_base = OTHER; note = bicyclic nucleic acid (BNA)
  modified_base 10: mod_base = OTHER; note = bicyclic nucleic acid (BNA)
  modified_base 14: mod_base = OTHER; note = bicyclic nucleic acid (BNA)
  source 1..18: mol_type = other DNA
  modified_base 4: mod_base = OTHER; note = Uracil
  modified_base 15: mod_base = OTHER; note = Uracil
  modified_base 16: mod_base = OTHER; note = Uracil
ctgtccaagcccggttga

SEQ ID NO: 13964 - DNA, 18 bp, synthetic construct
  misc_feature 1..18: note = Description of Artificial Sequence: Synthetic Antisense oligonucleotide
  misc_feature 1..18: note = Original Sequence: ctguccaagcccgguuga
  modified_base 1..2: mod_base = OTHER; note = bicyclic nucleic acid (BNA)
  modified_base 6: mod_base = OTHER; note = bicyclic nucleic acid (BNA)
  modified_base 11: mod_base = OTHER; note = bicyclic nucleic acid (BNA)
  source 1..18: mol_type = other DNA
  modified_base 4: mod_base = OTHER; note = Uracil
  modified_base 15: mod_base = OTHER; note = Uracil
  modified_base 16: mod_base = OTHER; note = Uracil
ctgtccaagcccggttga

SEQ ID NO: 13965 - DNA, 18 bp, synthetic construct
  misc_feature 1..18: note = Description of Artificial Sequence: Synthetic Antisense oligonucleotide
  misc_feature 1..18: note = Original Sequence: ctguccaagcccgguuga
  modified_base 1..2: mod_base = OTHER; note = bicyclic nucleic acid (BNA)
  modified_base 6: mod_base = OTHER; note = bicyclic nucleic acid (BNA)
  modified_base 17: mod_base = OTHER; note = bicyclic nucleic acid (BNA)
  source 1..18: mol_type = other DNA
  modified_base 4: mod_base = OTHER; note = Uracil
  modified_base 15: mod_base = OTHER; note = Uracil
  modified_base 16: mod_base = OTHER; note = Uracil
ctgtccaagcccggttga

SEQ ID NO: 13966 - DNA, 18 bp, synthetic construct
  misc_feature 1..18: note = Description of Artificial Sequence: Synthetic Antisense oligonucleotide
  misc_feature 1..18: note = Original Sequence: ctguccaagcccgguuga
  modified_base 1..2: mod_base = OTHER; note = bicyclic nucleic acid (BNA)
  modified_base 9: mod_base = OTHER; note = bicyclic nucleic acid (BNA)
  modified_base 13: mod_base = OTHER; note = bicyclic nucleic acid (BNA)
  source 1..18: mol_type = other DNA
  modified_base 4: mod_base = OTHER; note = Uracil
  modified_base 15: mod_base = OTHER; note = Uracil
  modified_base 16: mod_base = OTHER; note = Uracil
ctgtccaagcccggttga

SEQ ID NO: 13967 - DNA, 18 bp, synthetic construct
  misc_feature 1..18: note = Description of Artificial Sequence: Synthetic Antisense oligonucleotide
  misc_feature 1..18: note = Original Sequence: ctguccaagcccgguuga
  modified_base 1..2: mod_base = OTHER; note = bicyclic nucleic acid (BNA)
  modified_base 11: mod_base = OTHER; note = bicyclic nucleic acid (BNA)
  modified_base 17: mod_base = OTHER; note = bicyclic nucleic acid (BNA)
  source 1..18: mol_type = other DNA
  modified_base 4: mod_base = OTHER; note = Uracil
  modified_base 15: mod_base = OTHER; note = Uracil
  modified_base 16: mod_base = OTHER; note = Uracil
ctgtccaagcccggttga

SEQ ID NO: 13968 - DNA, 18 bp, synthetic construct
  misc_feature 1..18: note = Description of Artificial Sequence: Synthetic Antisense oligonucleotide
  misc_feature 1..18: note = Original Sequence: ctguccaagcccgguuga
  modified_base 1..3: mod_base = OTHER; note = bicyclic nucleic acid (BNA)
  modified_base 12: mod_base = OTHER; note = bicyclic nucleic acid (BNA)
  source 1..18: mol_type = other DNA
  modified_base 4: mod_base = OTHER; note = Uracil
  modified_base 15: mod_base = OTHER; note = Uracil
  modified_base 16: mod_base = OTHER; note = Uracil
ctgtccaagcccggttga

SEQ ID NO: 13969 - DNA, 18 bp, synthetic construct
  misc_feature 1..18: note = Description of Artificial Sequence: Synthetic Antisense oligonucleotide
  misc_feature 1..18: note = Original Sequence: ctguccaagcccgguuga
  modified_base 1..3: mod_base = OTHER; note = bicyclic nucleic acid (BNA)
  modified_base 5: mod_base = OTHER; note = bicyclic nucleic acid (BNA)
  source 1..18: mol_type = other DNA
  modified_base 4: mod_base = OTHER; note = Uracil
  modified_base 15: mod_base = OTHER; note = Uracil
  modified_base 16: mod_base = OTHER; note = Uracil
ctgtccaagcccggttga

SEQ ID NO: 13970 - DNA, 18 bp, synthetic construct
  misc_feature 1..18: note = Description of Artificial Sequence: Synthetic Antisense oligonucleotide
  misc_feature 1..18: note = Original Sequence: ctguccaagcccgguuga
  modified_base 1..2: mod_base = OTHER; note = bicyclic nucleic acid (BNA)
  modified_base 10: mod_base = OTHER; note = bicyclic nucleic acid (BNA)
  modified_base 13: mod_base = OTHER; note = bicyclic nucleic acid (BNA)
  source 1..18: mol_type = other DNA
  modified_base 4: mod_base = OTHER; note = Uracil
  modified_base 15: mod_base = OTHER; note = Uracil
  modified_base 16: mod_base = OTHER; note = Uracil
ctgtccaagcccggttga

SEQ ID NO: 13971 - DNA, 20 bp, synthetic construct
  misc_feature 1..20: note = Description of Artificial Sequence: Synthetic Antisense oligonucleotide
  misc_feature 1..20: note = Original Sequence: tcaaggaagauggcauuucu
  modified_base 1..2: mod_base = OTHER; note = bicyclic nucleic acid (BNA)
  modified_base 9: mod_base = OTHER; note = bicyclic nucleic acid (BNA)
  source 1..20: mol_type = other DNA
  modified_base 11: mod_base = OTHER; note = Uracil
  modified_base 16: mod_base = OTHER; note = Uracil
  modified_base 17: mod_base = OTHER; note = Uracil
  modified_base 18: mod_base = OTHER; note = Uracil
  modified_base 20: mod_base = OTHER; note = Uracil
tcaaggaagatggcatttct

SEQ ID NO: 13972 - DNA, 20 bp, synthetic construct
  misc_feature 1..20: note = Description of Artificial Sequence: Synthetic Antisense oligonucleotide
  misc_feature 1..20: note = Original Sequence: tcaaggaagauggcauuucu
  modified_base 1..2: mod_base = OTHER; note = bicyclic nucleic acid (BNA)
  modified_base 5: mod_base = OTHER; note = bicyclic nucleic acid (BNA)
  source 1..20: mol_type = other DNA
  modified_base 11: mod_base = OTHER; note = Uracil
  modified_base 16: mod_base = OTHER; note = Uracil
  modified_base 17: mod_base = OTHER; note = Uracil
  modified_base 18: mod_base = OTHER; note = Uracil
  modified_base 20: mod_base = OTHER; note = Uracil
tcaaggaagatggcatttct

SEQ ID NO: 13973 - DNA, 20 bp, synthetic construct
  misc_feature 1..20: note = Description of Artificial Sequence: Synthetic Antisense oligonucleotide
  misc_feature 1..20: note = Original Sequence: tcaaggaagauggcauuucu
  modified_base 1..2: mod_base = OTHER; note = bicyclic nucleic acid (BNA)
  modified_base 6: mod_base = OTHER; note = bicyclic nucleic acid (BNA)
  source 1..20: mol_type = other DNA
  modified_base 11: mod_base = OTHER; note = Uracil
  modified_base 16: mod_base = OTHER; note = Uracil
  modified_base 17: mod_base = OTHER; note = Uracil
  modified_base 18: mod_base = OTHER; note = Uracil
  modified_base 20: mod_base = OTHER; note = Uracil
tcaaggaagatggcatttct

SEQ ID NO: 13974 - DNA, 20 bp, synthetic construct
  misc_feature 1..20: note = Description of Artificial Sequence: Synthetic Antisense oligonucleotide
  misc_feature 1..20: note = Original Sequence: tcaaggaagauggcauuucu
  modified_base 1..2: mod_base = OTHER; note = bicyclic nucleic acid (BNA)
  modified_base 12: mod_base = OTHER; note = bicyclic nucleic acid (BNA)
  source 1..20: mol_type = other DNA
  modified_base 11: mod_base = OTHER; note = Uracil
  modified_base 16: mod_base = OTHER; note = Uracil
  modified_base 17: mod_base = OTHER; note = Uracil
  modified_base 18: mod_base = OTHER; note = Uracil
  modified_base 20: mod_base = OTHER; note = Uracil
tcaaggaagatggcatttct

SEQ ID NO: 13975 - DNA, 20 bp, synthetic construct
  misc_feature 1..20: note = Description of Artificial Sequence: Synthetic Antisense oligonucleotide
  misc_feature 1..20: note = Original Sequence: tcaaggaagauggcauuucu
  modified_base 1..2: mod_base = OTHER; note = bicyclic nucleic acid (BNA)
  modified_base 13: mod_base = OTHER; note = bicyclic nucleic acid (BNA)
  source 1..20: mol_type = other DNA
  modified_base 11: mod_base = OTHER; note = Uracil
  modified_base 16: mod_base = OTHER; note = Uracil
  modified_base 17: mod_base = OTHER; note = Uracil
  modified_base 18: mod_base = OTHER; note = Uracil
  modified_base 20: mod_base = OTHER; note = Uracil
tcaaggaagatggcatttct

SEQ ID NO: 13976 - DNA, 20 bp, synthetic construct
  misc_feature 1..20: note = Description of Artificial Sequence: Synthetic Antisense oligonucleotide
  misc_feature 1..20: note = Original Sequence: tcaaggaagauggcauuucu
  modified_base 1..2: mod_base = OTHER; note = bicyclic nucleic acid (BNA)
  modified_base 19: mod_base = OTHER; note = bicyclic nucleic acid (BNA)
  source 1..20: mol_type = other DNA
  modified_base 11: mod_base = OTHER; note = Uracil
  modified_base 16: mod_base = OTHER; note = Uracil
  modified_base 17: mod_base = OTHER; note = Uracil
  modified_base 18: mod_base = OTHER; note = Uracil
  modified_base 20: mod_base = OTHER; note = Uracil
tcaaggaagatggcatttct

SEQ ID NO: 13977 - DNA, 20 bp, synthetic construct
  misc_feature 1..20: note = Description of Artificial Sequence: Synthetic Antisense oligonucleotide
  misc_feature 1..20: note = Original Sequence: tcaaggaagauggcauuucu
  modified_base 1..2: mod_base = OTHER; note = bicyclic nucleic acid (BNA)
  modified_base 14: mod_base = OTHER; note = bicyclic nucleic acid (BNA)
  source 1..20: mol_type = other DNA
  modified_base 11: mod_base = OTHER; note = Uracil
  modified_base 16: mod_base = OTHER; note = Uracil
  modified_base 17: mod_base = OTHER; note = Uracil
  modified_base 18: mod_base = OTHER; note = Uracil
  modified_base 20: mod_base = OTHER; note = Uracil
tcaaggaagatggcatttct

SEQ ID NO: 13978 - DNA, 22 bp, synthetic construct
  misc_feature 1..22: note = Description of Artificial Sequence: Synthetic Antisense oligonucleotide
  misc_feature 1..22: note = Original Sequence: tcaaggaagauggcauuucuag
  modified_base 1..2: mod_base = OTHER; note = bicyclic nucleic acid (BNA)
  modified_base 9: mod_base = OTHER; note = bicyclic nucleic acid (BNA)
  source 1..22: mol_type = other DNA
  modified_base 11: mod_base = OTHER; note = Uracil
  modified_base 16: mod_base = OTHER; note = Uracil
  modified_base 17: mod_base = OTHER; note = Uracil
  modified_base 18: mod_base = OTHER; note = Uracil
  modified_base 20: mod_base = OTHER; note = Uracil
tcaaggaagatggcatttctag

SEQ ID NO: 13979 - DNA, 22 bp, synthetic construct
  misc_feature 1..22: note = Description of Artificial Sequence: Synthetic Antisense oligonucleotide
  misc_feature 1..22: note = Original Sequence: tcaaggaagauggcauuucuag
  modified_base 1..2: mod_base = OTHER; note = bicyclic nucleic acid (BNA)
  modified_base 5: mod_base = OTHER; note = bicyclic nucleic acid (BNA)
  source 1..22: mol_type = other DNA
  modified_base 11: mod_base = OTHER; note = Uracil
  modified_base 16: mod_base = OTHER; note = Uracil
  modified_base 17: mod_base = OTHER; note = Uracil
  modified_base 18: mod_base = OTHER; note = Uracil
  modified_base 20: mod_base = OTHER; note = Uracil
tcaaggaagatggcatttctag

SEQ ID NO: 13980 - DNA, 22 bp, synthetic construct
  misc_feature 1..22: note = Description of Artificial Sequence: Synthetic Antisense oligonucleotide
  misc_feature 1..22: note = Original Sequence: tcaaggaagauggcauuucuag
  modified_base 1..2: mod_base = OTHER; note = bicyclic nucleic acid (BNA)
  modified_base 6: mod_base = OTHER; note = bicyclic nucleic acid (BNA)
  source 1..22: mol_type = other DNA
  modified_base 11: mod_base = OTHER; note = Uracil
  modified_base 16: mod_base = OTHER; note = Uracil
  modified_base 17: mod_base = OTHER; note = Uracil
  modified_base 18: mod_base = OTHER; note = Uracil
  modified_base 20: mod_base = OTHER; note = Uracil
tcaaggaagatggcatttctag

SEQ ID NO: 13981 - DNA, 22 bp, synthetic construct
  misc_feature 1..22: note = Description of Artificial Sequence: Synthetic Antisense oligonucleotide
  misc_feature 1..22: note = Original Sequence: tcaaggaagauggcauuucuag
  modified_base 1..2: mod_base = OTHER; note = bicyclic nucleic acid (BNA)
  modified_base 12: mod_base = OTHER; note = bicyclic nucleic acid (BNA)
  source 1..22: mol_type = other DNA
  modified_base 11: mod_base = OTHER; note = Uracil
  modified_base 16: mod_base = OTHER; note = Uracil
  modified_base 17: mod_base = OTHER; note = Uracil
  modified_base 18: mod_base = OTHER; note = Uracil
  modified_base 20: mod_base = OTHER; note = Uracil
tcaaggaagatggcatttctag

SEQ ID NO: 13982 - DNA, 22 bp, synthetic construct
  misc_feature 1..22: note = Description of Artificial Sequence: Synthetic Antisense oligonucleotide
  misc_feature 1..22: note = Original Sequence: tcaaggaagauggcauuucuag
  modified_base 1..2: mod_base = OTHER; note = bicyclic nucleic acid (BNA)
  modified_base 13: mod_base = OTHER; note = bicyclic nucleic acid (BNA)
  source 1..22: mol_type = other DNA
  modified_base 11: mod_base = OTHER; note = Uracil
  modified_base 16: mod_base = OTHER; note = Uracil
  modified_base 17: mod_base = OTHER; note = Uracil
  modified_base 18: mod_base = OTHER; note = Uracil
  modified_base 20: mod_base = OTHER; note = Uracil
tcaaggaagatggcatttctag

SEQ ID NO: 13983 - DNA, 22 bp, synthetic construct
  misc_feature 1..22: note = Description of Artificial Sequence: Synthetic Antisense oligonucleotide
  misc_feature 1..22: note = Original Sequence: tcaaggaagauggcauuucuag
  modified_base 1..2: mod_base = OTHER; note = bicyclic nucleic acid (BNA)
  modified_base 19: mod_base = OTHER; note = bicyclic nucleic acid (BNA)
  source 1..22: mol_type = other DNA
  modified_base 11: mod_base = OTHER; note = Uracil
  modified_base 16: mod_base = OTHER; note = Uracil
  modified_base 17: mod_base = OTHER; note = Uracil
  modified_base 18: mod_base = OTHER; note = Uracil
  modified_base 20: mod_base = OTHER; note = Uracil
tcaaggaagatggcatttctag

SEQ ID NO: 13984 - DNA, 22 bp, synthetic construct
  misc_feature 1..22: note = Description of Artificial Sequence: Synthetic Antisense oligonucleotide
  misc_feature 1..22: note = Original Sequence: tcaaggaagauggcauuucuag
  modified_base 1..2: mod_base = OTHER; note = bicyclic nucleic acid (BNA)
  modified_base 14: mod_base = OTHER; note = bicyclic nucleic acid (BNA)
  source 1..22: mol_type = other DNA
  modified_base 11: mod_base = OTHER; note = Uracil
  modified_base 16: mod_base = OTHER; note = Uracil
  modified_base 17: mod_base = OTHER; note = Uracil
  modified_base 18: mod_base = OTHER; note = Uracil
  modified_base 20: mod_base = OTHER; note = Uracil
tcaaggaagatggcatttctag

SEQ ID NO: 13985 - DNA, 20 bp, synthetic construct
  misc_feature 1..20: note = Description of Artificial Sequence: Synthetic Antisense oligonucleotide
  misc_feature 1..20: note = Original Sequence: tcaaggaagauggcauuucu
  modified_base 1..2: mod_base = OTHER; note = bicyclic nucleic acid (BNA)
  modified_base 9: mod_base = OTHER; note = bicyclic nucleic acid (BNA)
  modified_base 14: mod_base = OTHER; note = bicyclic nucleic acid (BNA)
  source 1..20: mol_type = other DNA
  modified_base 11: mod_base = OTHER; note = Uracil
  modified_base 16: mod_base = OTHER; note = Uracil
  modified_base 17: mod_base = OTHER; note = Uracil
  modified_base 18: mod_base = OTHER; note = Uracil
  modified_base 20: mod_base = OTHER; note = Uracil
tcaaggaagatggcatttct

SEQ ID NO: 13986 - DNA, 20 bp, synthetic construct
  misc_feature 1..20: note = Description of Artificial Sequence: Synthetic Antisense oligonucleotide
  misc_feature 1..20: note = Original Sequence: tcaaggaagauggcauuucu
  modified_base 1..2: mod_base = OTHER; note = bicyclic nucleic acid (BNA)
  modified_base 5: mod_base = OTHER; note = bicyclic nucleic acid (BNA)
  modified_base 9: mod_base = OTHER; note = bicyclic nucleic acid (BNA)
  source 1..20: mol_type = other DNA
  modified_base 11: mod_base = OTHER; note = Uracil
  modified_base 16: mod_base = OTHER; note = Uracil
  modified_base 17: mod_base = OTHER; note = Uracil
  modified_base 18: mod_base = OTHER; note = Uracil
  modified_base 20: mod_base = OTHER; note = Uracil
tcaaggaagatggcatttct

SEQ ID NO: 13987 - DNA, 20 bp, synthetic construct
  misc_feature 1..20: note = Description of Artificial Sequence: Synthetic Antisense oligonucleotide
  misc_feature 1..20: note = Original Sequence: tcaaggaagauggcauuucu
  modified_base 1..2: mod_base = OTHER; note = bicyclic nucleic acid (BNA)
  modified_base 5: mod_base = OTHER; note = bicyclic nucleic acid (BNA)
  modified_base 19: mod_base = OTHER; note = bicyclic nucleic acid (BNA)
  source 1..20: mol_type = other DNA
  modified_base 11: mod_base = OTHER; note = Uracil
  modified_base 16: mod_base = OTHER; note = Uracil
  modified_base 17: mod_base = OTHER; note = Uracil
  modified_base 18: mod_base = OTHER; note = Uracil
  modified_base 20: mod_base = OTHER; note = Uracil
tcaaggaagatggcatttct

SEQ ID NO: 13988 - DNA, 20 bp, synthetic construct
  misc_feature 1..20: note = Description of Artificial Sequence: Synthetic Antisense oligonucleotide
  misc_feature 1..20: note = Original Sequence: tcaaggaagauggcauuucu
  modified_base 1..2: mod_base = OTHER; note = bicyclic nucleic acid (BNA)
  modified_base 6: mod_base = OTHER; note = bicyclic nucleic acid (BNA)
  modified_base 14: mod_base = OTHER; note = bicyclic nucleic acid (BNA)
  source 1..20: mol_type = other DNA
  modified_base 11: mod_base = OTHER; note = Uracil
  modified_base 16: mod_base = OTHER; note = Uracil
  modified_base 17: mod_base = OTHER; note = Uracil
  modified_base 18: mod_base = OTHER; note = Uracil
  modified_base 20: mod_base = OTHER; note = Uracil
tcaaggaagatggcatttct

SEQ ID NO: 13989 - DNA, 20 bp, synthetic construct
  misc_feature 1..20: note = Description of Artificial Sequence: Synthetic Antisense oligonucleotide
  misc_feature 1..20: note = Original Sequence: tcaaggaagauggcauuucu
  modified_base 1..2: mod_base = OTHER; note = bicyclic nucleic acid (BNA)
  modified_base 5: mod_base = OTHER; note = bicyclic nucleic acid (BNA)
  modified_base 13: mod_base = OTHER; note = bicyclic nucleic acid (BNA)
  source 1..20: mol_type = other DNA
  modified_base 11: mod_base = OTHER; note = Uracil
  modified_base 16: mod_base = OTHER; note = Uracil
  modified_base 17: mod_base = OTHER; note = Uracil
  modified_base 18: mod_base = OTHER; note = Uracil
  modified_base 20: mod_base = OTHER; note = Uracil
tcaaggaagatggcatttct

SEQ ID NO: 13990 - DNA, 20 bp, synthetic construct
  misc_feature 1..20: note = Description of Artificial Sequence: Synthetic Antisense oligonucleotide
  misc_feature 1..20: note = Original Sequence: tcaaggaagauggcauuucu
  modified_base 1..2: mod_base = OTHER; note = bicyclic nucleic acid (BNA)
  modified_base 6: mod_base = OTHER; note = bicyclic nucleic acid (BNA)
  modified_base 9: mod_base = OTHER; note = bicyclic nucleic acid (BNA)
  source 1..20: mol_type = other DNA
  modified_base 11: mod_base = OTHER; note = Uracil
  modified_base 16: mod_base = OTHER; note = Uracil
  modified_base 17: mod_base = OTHER; note = Uracil
  modified_base 18: mod_base = OTHER; note = Uracil
  modified_base 20: mod_base = OTHER; note = Uracil
tcaaggaagatggcatttct

SEQ ID NO: 13991 - DNA, 20 bp, synthetic construct
  misc_feature 1..20: note = Description of Artificial Sequence: Synthetic Antisense oligonucleotide
  misc_feature 1..20: note = Original Sequence: tcaaggaagauggcauuucu
  modified_base 1..2: mod_base = OTHER; note = bicyclic nucleic acid (BNA)
  modified_base 13..14: mod_base = OTHER; note = bicyclic nucleic acid (BNA)
  source 1..20: mol_type = other DNA
  modified_base 11: mod_base = OTHER; note = Uracil
  modified_base 16: mod_base = OTHER; note = Uracil
  modified_base 17: mod_base = OTHER; note = Uracil
  modified_base 18: mod_base = OTHER; note = Uracil
  modified_base 20: mod_base = OTHER; note = Uracil
tcaaggaagatggcatttct

SEQ ID NO: 13992 - DNA, 20 bp, synthetic construct
  misc_feature 1..20: note = Description of Artificial Sequence: Synthetic Antisense oligonucleotide
  misc_feature 1..20: note = Original Sequence: tcaaggaagauggcauuucu
  modified_base 1..2: mod_base = OTHER; note = bicyclic nucleic acid (BNA)
  modified_base 6: mod_base = OTHER; note = bicyclic nucleic acid (BNA)
  modified_base 13: mod_base = OTHER; note = bicyclic nucleic acid (BNA)
  source 1..20: mol_type = other DNA
  modified_base 11: mod_base = OTHER; note = Uracil
  modified_base 16: mod_base = OTHER; note = Uracil
  modified_base 17: mod_base = OTHER; note = Uracil
  modified_base 18: mod_base = OTHER; note = Uracil
  modified_base 20: mod_base = OTHER; note = Uracil
tcaaggaagatggcatttct

SEQ ID NO: 13993 - DNA, 20 bp, synthetic construct
  misc_feature 1..20: note = Description of Artificial Sequence: Synthetic Antisense oligonucleotide
  misc_feature 1..20: note = Original Sequence: tcaaggaagauggcauuucu
  modified_base 1..2: mod_base = OTHER; note = bicyclic nucleic acid (BNA)
  modified_base 6: mod_base = OTHER; note = bicyclic nucleic acid (BNA)
  modified_base 19: mod_base = OTHER; note = bicyclic nucleic acid (BNA)
  source 1..20: mol_type = other DNA
  modified_base 11: mod_base = OTHER; note = Uracil
  modified_base 16: mod_base = OTHER; note = Uracil
  modified_base 17: mod_base = OTHER; note = Uracil
  modified_base 18: mod_base = OTHER; note = Uracil
  modified_base 20: mod_base = OTHER; note = Uracil
tcaaggaagatggcatttct

SEQ ID NO: 13994 - DNA, 20 bp, synthetic construct
  misc_feature 1..20: note = Description of Artificial Sequence: Synthetic Antisense oligonucleotide
  misc_feature 1..20: note = Original Sequence: tcaaggaagauggcauuucu
  modified_base 1..2: mod_base = OTHER; note = bicyclic nucleic acid (BNA)
  modified_base 5: mod_base = OTHER; note = bicyclic nucleic acid (BNA)
  modified_base 14: mod_base = OTHER; note = bicyclic nucleic acid (BNA)
  source 1..20: mol_type = other DNA
  modified_base 11: mod_base = OTHER; note = Uracil
  modified_base 16: mod_base = OTHER; note = Uracil
  modified_base 17: mod_base = OTHER; note = Uracil
  modified_base 18: mod_base = OTHER; note = Uracil
  modified_base 20: mod_base = OTHER; note = Uracil
tcaaggaagatggcatttct

SEQ ID NO: 13995 - DNA, 20 bp, synthetic construct
  misc_feature 1..20: note = Description of Artificial Sequence: Synthetic Antisense oligonucleotide
  misc_feature 1..20: note = Original Sequence: tcaaggaagauggcauuucu
  modified_base 1..2: mod_base = OTHER; note = bicyclic nucleic acid (BNA)
  modified_base 12: mod_base = OTHER; note = bicyclic nucleic acid (BNA)
  modified_base 19: mod_base = OTHER; note = bicyclic nucleic acid (BNA)
  source 1..20: mol_type = other DNA
  modified_base 11: mod_base = OTHER; note = Uracil
  modified_base 16: mod_base = OTHER; note = Uracil
  modified_base 17: mod_base = OTHER; note = Uracil
  modified_base 18: mod_base = OTHER; note = Uracil
  modified_base 20: mod_base = OTHER; note = Uracil
tcaaggaagatggcatttct

SEQ ID NO: 13996 - DNA, 20 bp, synthetic construct
  misc_feature 1..20: note = Description of Artificial Sequence: Synthetic Antisense oligonucleotide
  misc_feature 1..20: note = Original Sequence: tcaaggaagauggcauuucu
  modified_base 1..2: mod_base = OTHER; note = bicyclic nucleic acid (BNA)
  modified_base 12: mod_base = OTHER; note = bicyclic nucleic acid (BNA)
  modified_base 14: mod_base = OTHER; note = bicyclic nucleic acid (BNA)
  source 1..20: mol_type = other DNA
  modified_base 11: mod_base = OTHER; note = Uracil
  modified_base 16: mod_base = OTHER; note = Uracil
  modified_base 17: mod_base = OTHER; note = Uracil
  modified_base 18: mod_base = OTHER; note = Uracil
  modified_base 20: mod_base = OTHER; note = Uracil
tcaaggaagatggcatttct

SEQ ID NO: 13997 - DNA, 20 bp, synthetic construct
  misc_feature 1..20: note = Description of Artificial Sequence: Synthetic Antisense oligonucleotide
  misc_feature 1..20: note = Original Sequence: tcaaggaagauggcauuucu
  modified_base 1..2: mod_base = OTHER; note = bicyclic nucleic acid (BNA)
  modified_base 6: mod_base = OTHER; note = bicyclic nucleic acid (BNA)
  modified_base 12: mod_base = OTHER; note = bicyclic nucleic acid (BNA)
  source 1..20: mol_type = other DNA
  modified_base 11: mod_base = OTHER; note = Uracil
  modified_base 16: mod_base = OTHER; note = Uracil
  modified_base 17: mod_base = OTHER; note = Uracil
  modified_base 18: mod_base = OTHER; note = Uracil
  modified_base 20: mod_base = OTHER; note = Uracil
tcaaggaagatggcatttct

SEQ ID NO: 13998 - DNA, 20 bp, synthetic construct
  misc_feature 1..20: note = Description of Artificial Sequence: Synthetic Antisense oligonucleotide
  misc_feature 1..20: note = Original Sequence: tcaaggaagauggcauuucu
  modified_base 1..2: mod_base = OTHER; note = bicyclic nucleic acid (BNA)
  modified_base 5..6: mod_base = OTHER; note = bicyclic nucleic acid (BNA)
  source 1..20: mol_type = other DNA
  modified_base 11: mod_base = OTHER; note = Uracil
  modified_base 16: mod_base = OTHER; note = Uracil
  modified_base 17: mod_base = OTHER; note = Uracil
  modified_base 18: mod_base = OTHER; note = Uracil
  modified_base 20: mod_base = OTHER; note = Uracil
tcaaggaagatggcatttct

SEQ ID NO: 13999 - DNA, 20 bp, synthetic construct
  misc_feature 1..20: note = Description of Artificial Sequence: Synthetic Antisense oligonucleotide
  misc_feature 1..20: note = Original Sequence: tcaaggaagauggcauuucu
  modified_base 1..2: mod_base = OTHER; note = bicyclic nucleic acid (BNA)
  modified_base 9: mod_base = OTHER; note = bicyclic nucleic acid (BNA)
  modified_base 12: mod_base = OTHER; note = bicyclic nucleic acid (BNA)
  source 1..20: mol_type = other DNA
  modified_base 11: mod_base = OTHER; note = Uracil
  modified_base 16: mod_base = OTHER; note = Uracil
  modified_base 17: mod_base = OTHER; note = Uracil
  modified_base 18: mod_base = OTHER; note = Uracil
  modified_base 20: mod_base = OTHER; note = Uracil
tcaaggaagatggcatttct

SEQ ID NO: 14000 - DNA, 20 bp, synthetic construct
  misc_feature 1..20: note = Description of Artificial Sequence: Synthetic Antisense oligonucleotide
  misc_feature 1..20: note = Original Sequence: tcaaggaagauggcauuucu
  modified_base 1..2: mod_base = OTHER; note = bicyclic nucleic acid (BNA)
  modified_base 13: mod_base = OTHER; note = bicyclic nucleic acid (BNA)
  modified_base 19: mod_base = OTHER; note = bicyclic nucleic acid (BNA)
  source 1..20: mol_type = other DNA
  modified_base 11: mod_base = OTHER; note = Uracil
  modified_base 16: mod_base = OTHER; note = Uracil
  modified_base 17: mod_base = OTHER; note = Uracil
  modified_base 18: mod_base = OTHER; note = Uracil
  modified_base 20: mod_base = OTHER; note = Uracil
tcaaggaagatggcatttct

SEQ ID NO: 14001 - DNA, 20 bp, synthetic construct
  misc_feature 1..20: note = Description of Artificial Sequence: Synthetic Antisense oligonucleotide
  misc_feature 1..20: note = Original Sequence: tcaaggaagauggcauuucu
  modified_base 1..2: mod_base = OTHER; note = bicyclic nucleic acid (BNA)
  modified_base 12..13: mod_base = OTHER; note = bicyclic nucleic acid (BNA)
  source 1..20: mol_type = other DNA
  modified_base 11: mod_base = OTHER; note = Uracil
  modified_base 16: mod_base = OTHER; note = Uracil
  modified_base 17: mod_base = OTHER; note = Uracil
  modified_base 18: mod_base = OTHER; note = Uracil
  modified_base 20: mod_base = OTHER; note = Uracil
tcaaggaagatggcatttct

SEQ ID NO: 14002 - DNA, 20 bp, synthetic construct
  misc_feature 1..20: note = Description of Artificial Sequence: Synthetic Antisense oligonucleotide
  misc_feature 1..20: note = Original Sequence: tcaaggaagauggcauuucu
  modified_base 1..2: mod_base = OTHER; note = bicyclic nucleic acid (BNA)
  modified_base 5: mod_base = OTHER; note = bicyclic nucleic acid (BNA)
  modified_base 12: mod_base = OTHER; note = bicyclic nucleic acid (BNA)
  source 1..20: mol_type = other DNA
  modified_base 11: mod_base = OTHER; note = Uracil
  modified_base 16: mod_base = OTHER; note = Uracil
  modified_base 17: mod_base = OTHER; note = Uracil
  modified_base 18: mod_base = OTHER; note = Uracil
  modified_base 20: mod_base = OTHER; note = Uracil
tcaaggaagatggcatttct

SEQ ID NO: 14003 - DNA, 20 bp, synthetic construct
  misc_feature 1..20: note = Description of Artificial Sequence: Synthetic Antisense oligonucleotide
  misc_feature 1..20: note = Original Sequence: tcaaggaagauggcauuucu
  modified_base 1..2: mod_base = OTHER; note = bicyclic nucleic acid (BNA)
  modified_base 9: mod_base = OTHER; note = bicyclic nucleic acid (BNA)
  modified_base 13: mod_base = OTHER; note = bicyclic nucleic acid (BNA)
  source 1..20: mol_type = other DNA
  modified_base 11: mod_base = OTHER; note = Uracil
  modified_base 16: mod_base = OTHER; note = Uracil
  modified_base 17: mod_base = OTHER; note = Uracil
  modified_base 18: mod_base = OTHER; note = Uracil
  modified_base 20: mod_base = OTHER; note = Uracil
tcaaggaagatggcatttct

SEQ ID NO: 14004 - DNA, 20 bp, synthetic construct
  misc_feature 1..20: note = Description of Artificial Sequence: Synthetic Antisense oligonucleotide
  misc_feature 1..20: note = Original Sequence: tcaaggaagauggcauuucu
  modified_base 1..2: mod_base = OTHER; note = bicyclic nucleic acid (BNA)
  modified_base 14: mod_base = OTHER; note = bicyclic nucleic acid (BNA)
  modified_base 19: mod_base = OTHER; note = bicyclic nucleic acid (BNA)
  source 1..20: mol_type = other DNA
  modified_base 11: mod_base = OTHER; note = Uracil
  modified_base 16: mod_base = OTHER; note = Uracil
  modified_base 17: mod_base = OTHER; note = Uracil
  modified_base 18: mod_base = OTHER; note = Uracil
  modified_base 20: mod_base = OTHER; note = Uracil
tcaaggaagatggcatttct

SEQ ID NO: 14005 - DNA, 20 bp, synthetic construct
  misc_feature 1..20: note = Description of Artificial Sequence: Synthetic Antisense oligonucleotide
  misc_feature 1..20: note = Original Sequence: tcaaggaagauggcauuucu
  modified_base 1..2: mod_base = OTHER; note = bicyclic nucleic acid (BNA)
  modified_base 9: mod_base = OTHER; note = bicyclic nucleic acid (BNA)
  modified_base 19: mod_base = OTHER; note = bicyclic nucleic acid (BNA)
  source 1..20: mol_type = other DNA
  modified_base 11: mod_base = OTHER; note = Uracil
  modified_base 16: mod_base = OTHER; note = Uracil
  modified_base 17: mod_base = OTHER; note = Uracil
  modified_base 18: mod_base = OTHER; note = Uracil
  modified_base 20: mod_base = OTHER; note = Uracil
tcaaggaagatggcatttct

SEQ ID NO: 14006 - DNA, 22 bp, synthetic construct
  misc_feature 1..22: note = Description of Artificial Sequence: Synthetic Antisense oligonucleotide
  misc_feature 1..22: note = Original Sequence: tcaaggaagauggcauuucuag
  modified_base 1..2: mod_base = OTHER; note = bicyclic nucleic acid (BNA)
  modified_base 9: mod_base = OTHER; note = bicyclic nucleic acid (BNA)
  modified_base 14: mod_base = OTHER; note = bicyclic nucleic acid (BNA)
  source 1..22: mol_type = other DNA
  modified_base 11: mod_base = OTHER; note = Uracil
  modified_base 16: mod_base = OTHER; note = Uracil
  modified_base 17: mod_base = OTHER; note = Uracil
  modified_base 18: mod_base = OTHER; note = Uracil
  modified_base 20: mod_base = OTHER; note = Uracil
tcaaggaagatggcatttctag

SEQ ID NO: 14007 - DNA, 22 bp, synthetic construct
  misc_feature 1..22: note = Description of Artificial Sequence: Synthetic Antisense oligonucleotide
  misc_feature 1..22: note = Original Sequence: tcaaggaagauggcauuucuag
  modified_base 1..2: mod_base = OTHER; note = bicyclic nucleic acid (BNA)
  modified_base 5: mod_base = OTHER; note = bicyclic nucleic acid (BNA)
  modified_base 9: mod_base = OTHER; note = bicyclic nucleic acid (BNA)
  source 1..22: mol_type = other DNA
  modified_base 11: mod_base = OTHER; note = Uracil
  modified_base 16: mod_base = OTHER; note = Uracil
  modified_base 17: mod_base = OTHER; note = Uracil
  modified_base 18: mod_base = OTHER; note = Uracil
  modified_base 20: mod_base = OTHER; note = Uracil
tcaaggaagatggcatttctag

SEQ ID NO: 14008 - DNA, 22 bp, synthetic construct
  misc_feature 1..22: note = Description of Artificial Sequence: Synthetic Antisense oligonucleotide
  misc_feature 1..22: note = Original Sequence: tcaaggaagauggcauuucuag
  modified_base 1..2: mod_base = OTHER; note = bicyclic nucleic acid (BNA)
  modified_base 5: mod_base = OTHER; note = bicyclic nucleic acid (BNA)
  modified_base 19: mod_base = OTHER; note = bicyclic nucleic acid (BNA)
  source 1..22: mol_type = other DNA
  modified_base 11: mod_base = OTHER; note = Uracil
  modified_base 16: mod_base = OTHER; note = Uracil
  modified_base 17: mod_base = OTHER; note = Uracil
  modified_base 18: mod_base = OTHER; note = Uracil
  modified_base 20: mod_base = OTHER; note = Uracil
tcaaggaagatggcatttctag

SEQ ID NO: 14009 - DNA, 22 bp, synthetic construct
  misc_feature 1..22: note = Description of Artificial Sequence: Synthetic Antisense oligonucleotide
  misc_feature 1..22: note = Original Sequence: tcaaggaagauggcauuucuag
  modified_base 1..2: mod_base = OTHER; note = bicyclic nucleic acid (BNA)
  modified_base 6: mod_base = OTHER; note = bicyclic nucleic acid (BNA)
  modified_base 14: mod_base = OTHER; note = bicyclic nucleic acid (BNA)
  source 1..22: mol_type = other DNA
  modified_base 11: mod_base = OTHER; note = Uracil
  modified_base 16: mod_base = OTHER; note = Uracil
  modified_base 17: mod_base = OTHER; note = Uracil
  modified_base 18: mod_base = OTHER; note = Uracil
  modified_base 20: mod_base = OTHER; note = Uracil
tcaaggaagatggcatttctag

SEQ ID NO: 14010 - DNA, 22 bp, synthetic construct
  misc_feature 1..22: note = Description of Artificial Sequence: Synthetic Antisense oligonucleotide
  misc_feature 1..22: note = Original Sequence: tcaaggaagauggcauuucuag
  modified_base 1..2: mod_base = OTHER; note = bicyclic nucleic acid (BNA)
  modified_base 5: mod_base = OTHER; note = bicyclic nucleic acid (BNA)
  modified_base 13: mod_base = OTHER; note = bicyclic nucleic acid (BNA)
  source 1..22: mol_type = other DNA
  modified_base 11: mod_base = OTHER; note = Uracil
  modified_base 16: mod_base = OTHER; note = Uracil
  modified_base 17: mod_base = OTHER; note = Uracil
  modified_base 18: mod_base = OTHER; note = Uracil
  modified_base 20: mod_base = OTHER; note = Uracil
tcaaggaagatggcatttctag

SEQ ID NO: 14011 - DNA, 22 bp, synthetic construct
  misc_feature 1..22: note = Description of Artificial Sequence: Synthetic Antisense oligonucleotide
  misc_feature 1..22: note = Original Sequence: tcaaggaagauggcauuucuag
  modified_base 1..2: mod_base = OTHER; note = bicyclic nucleic acid (BNA)
  modified_base 6: mod_base = OTHER; note = bicyclic nucleic acid (BNA)
  modified_base 9: mod_base = OTHER; note = bicyclic nucleic acid (BNA)
  source 1..22: mol_type = other DNA
  modified_base 11: mod_base = OTHER; note = Uracil
  modified_base 16: mod_base = OTHER; note = Uracil
  modified_base 17: mod_base = OTHER; note = Uracil
  modified_base 18: mod_base = OTHER; note = Uracil
  modified_base 20: mod_base = OTHER; note = Uracil
tcaaggaagatggcatttctag

SEQ ID NO: 14012 - DNA, 22 bp, synthetic construct
  misc_feature 1..22: note = Description of Artificial Sequence: Synthetic Antisense oligonucleotide
  misc_feature 1..22: note = Original Sequence: tcaaggaagauggcauuucuag
  modified_base 1..2: mod_base = OTHER; note = bicyclic nucleic acid (BNA)
  modified_base 13..14: mod_base = OTHER; note = bicyclic nucleic acid (BNA)
  source 1..22: mol_type = other DNA
  modified_base 11: mod_base = OTHER; note = Uracil
  modified_base 16: mod_base = OTHER; note = Uracil
  modified_base 17: mod_base = OTHER; note = Uracil
  modified_base 18: mod_base = OTHER; note = Uracil
  modified_base 20: mod_base = OTHER; note = Uracil
tcaaggaagatggcatttctag

SEQ ID NO: 14013 - DNA, 22 bp, synthetic construct
  misc_feature 1..22: note = Description of Artificial Sequence: Synthetic Antisense oligonucleotide
  misc_feature 1..22: note = Original Sequence: tcaaggaagauggcauuucuag
  modified_base 1..2: mod_base = OTHER; note = bicyclic nucleic acid (BNA)
  modified_base 6: mod_base = OTHER; note = bicyclic nucleic acid (BNA)
  modified_base 13: mod_base = OTHER; note = bicyclic nucleic acid (BNA)
  source 1..22: mol_type = other DNA
  modified_base 11: mod_base = OTHER; note = Uracil
  modified_base 16: mod_base = OTHER; note = Uracil
  modified_base 17: mod_base = OTHER; note = Uracil
  modified_base 18: mod_base = OTHER; note = Uracil
  modified_base 20: mod_base = OTHER; note = Uracil
tcaaggaagatggcatttctag

SEQ ID NO: 14014 - DNA, 22 bp, synthetic construct
  misc_feature 1..22: note = Description of Artificial Sequence: Synthetic Antisense oligonucleotide
  misc_feature 1..22: note = Original Sequence: tcaaggaagauggcauuucuag
  modified_base 1..2: mod_base = OTHER; note = bicyclic nucleic acid (BNA)
  modified_base 6: mod_base = OTHER; note = bicyclic nucleic acid (BNA)
  modified_base 19: mod_base = OTHER; note = bicyclic nucleic acid (BNA)
  source 1..22: mol_type = other DNA
  modified_base 11: mod_base = OTHER; note = Uracil
  modified_base 16: mod_base = OTHER; note = Uracil
  modified_base 17: mod_base = OTHER; note = Uracil
  modified_base 18: mod_base = OTHER; note = Uracil
  modified_base 20: mod_base = OTHER; note = Uracil
tcaaggaagatggcatttctag

SEQ ID NO: 14015 - DNA, 22 bp, synthetic construct
  misc_feature 1..22: note = Description of Artificial Sequence: Synthetic Antisense oligonucleotide
  misc_feature 1..22: note = Original Sequence: tcaaggaagauggcauuucuag
  modified_base 1..2: mod_base = OTHER; note = bicyclic nucleic acid (BNA)
  modified_base 5: mod_base = OTHER; note = bicyclic nucleic acid (BNA)
  modified_base 14: mod_base = OTHER; note = bicyclic nucleic acid (BNA)
  source 1..22: mol_type = other DNA
  modified_base 11: mod_base = OTHER; note = Uracil
  modified_base 16: mod_base = OTHER; note = Uracil
  modified_base 17: mod_base = OTHER; note = Uracil
  modified_base 18: mod_base = OTHER; note = Uracil
  modified_base 20: mod_base = OTHER; note = Uracil
tcaaggaagatggcatttctag

SEQ ID NO: 14016 - DNA, 22 bp, synthetic construct
  misc_feature 1..22: note = Description of Artificial Sequence: Synthetic Antisense oligonucleotide
  misc_feature 1..22: note = Original Sequence: tcaaggaagauggcauuucuag
  modified_base 1..2: mod_base = OTHER; note = bicyclic nucleic acid (BNA)
  modified_base 12: mod_base = OTHER; note = bicyclic nucleic acid (BNA)
  modified_base 19: mod_base = OTHER; note = bicyclic nucleic acid (BNA)
  source 1..22: mol_type = other DNA
  modified_base 11: mod_base = OTHER; note = Uracil
  modified_base 16: mod_base = OTHER; note = Uracil
  modified_base 17: mod_base = OTHER; note = Uracil
  modified_base 18: mod_base = OTHER; note = Uracil
  modified_base 20: mod_base = OTHER; note = Uracil
tcaaggaagatggcatttctag

SEQ ID NO: 14017 - DNA, 22 bp, synthetic construct
  misc_feature 1..22: note = Description of Artificial Sequence: Synthetic Antisense oligonucleotide
  misc_feature 1..22: note = Original Sequence: tcaaggaagauggcauuucuag
  modified_base 1..2: mod_base = OTHER; note = bicyclic nucleic acid (BNA)
  modified_base 12: mod_base = OTHER; note = bicyclic nucleic acid (BNA)
  modified_base 14: mod_base = OTHER; note = bicyclic nucleic acid (BNA)
  source 1..22: mol_type = other DNA
  modified_base 11: mod_base = OTHER; note = Uracil
  modified_base 16: mod_base = OTHER; note = Uracil
  modified_base 17: mod_base = OTHER; note = Uracil
  modified_base 18: mod_base = OTHER; note = Uracil
  modified_base 20: mod_base = OTHER; note = Uracil
tcaaggaagatggcatttctag

SEQ ID NO: 14018 - DNA, 22 bp, synthetic construct
  misc_feature 1..22: note = Description of Artificial Sequence: Synthetic Antisense oligonucleotide
  misc_feature 1..22: note = Original Sequence: tcaaggaagauggcauuucuag
  modified_base 1..2: mod_base = OTHER; note = bicyclic nucleic acid (BNA)
  modified_base 6: mod_base = OTHER; note = bicyclic nucleic acid (BNA)
  modified_base 12: mod_base = OTHER; note = bicyclic nucleic acid (BNA)
  source 1..22: mol_type = other DNA
  modified_base 11: mod_base = OTHER; note = Uracil
  modified_base 16: mod_base = OTHER; note = Uracil
  modified_base 17: mod_base = OTHER; note = Uracil
  modified_base 18: mod_base = OTHER; note = Uracil
  modified_base 20: mod_base = OTHER; note = Uracil
tcaaggaagatggcatttctag

SEQ ID NO: 14019 - DNA, 22 bp, synthetic construct
  misc_feature 1..22: note = Description of Artificial Sequence: Synthetic Antisense oligonucleotide
  misc_feature 1..22: note = Original Sequence: tcaaggaagauggcauuucuag
  modified_base 1..2: mod_base = OTHER; note = bicyclic nucleic acid (BNA)
  modified_base 5..6: mod_base = OTHER; note = bicyclic nucleic acid (BNA)
  source 1..22: mol_type = other DNA
  modified_base 11: mod_base = OTHER; note = Uracil
  modified_base 16: mod_base = OTHER; note = Uracil
  modified_base 17: mod_base = OTHER; note = Uracil
  modified_base 18: mod_base = OTHER; note = Uracil
  modified_base 20: mod_base = OTHER; note = Uracil
tcaaggaagatggcatttctag

SEQ ID NO: 14020 - DNA, 22 bp, synthetic construct
  misc_feature 1..22: note = Description of Artificial Sequence: Synthetic Antisense oligonucleotide
  misc_feature 1..22: note = Original Sequence: tcaaggaagauggcauuucuag
  modified_base 1..2: mod_base = OTHER; note = bicyclic nucleic acid (BNA)
  modified_base 9: mod_base = OTHER; note = bicyclic nucleic acid (BNA)
  modified_base 12: mod_base = OTHER; note = bicyclic nucleic acid (BNA)
  source 1..22: mol_type = other DNA
  modified_base 11: mod_base = OTHER; note = Uracil
  modified_base 16: mod_base = OTHER; note = Uracil
  modified_base 17: mod_base = OTHER; note = Uracil
  modified_base 18: mod_base = OTHER; note = Uracil
  modified_base 20: mod_base = OTHER; note = Uracil
tcaaggaagatggcatttctag

SEQ ID NO: 14021 - DNA, 22 bp, synthetic construct
  misc_feature 1..22: note = Description of Artificial Sequence: Synthetic Antisense oligonucleotide
  misc_feature 1..22: note = Original Sequence: tcaaggaagauggcauuucuag
  modified_base 1..2: mod_base = OTHER; note = bicyclic nucleic acid (BNA)
  modified_base 13: mod_base = OTHER; note = bicyclic nucleic acid (BNA)
  modified_base 19: mod_base = OTHER; note = bicyclic nucleic acid (BNA)
  source 1..22: mol_type = other DNA
  modified_base 11: mod_base = OTHER; note = Uracil
  modified_base 16: mod_base = OTHER; note = Uracil
  modified_base 17: mod_base = OTHER; note = Uracil
  modified_base 18: mod_base = OTHER; note = Uracil
  modified_base 20: mod_base = OTHER; note = Uracil
tcaaggaagatggcatttctag

SEQ ID NO: 14022 - DNA, 22 bp, synthetic construct
  misc_feature 1..22: note = Description of Artificial Sequence: Synthetic Antisense oligonucleotide
  misc_feature 1..22: note = Original Sequence: tcaaggaagauggcauuucuag
  modified_base 1..2: mod_base = OTHER; note = bicyclic nucleic acid (BNA)
  modified_base 12..13: mod_base = OTHER; note = bicyclic nucleic acid (BNA)
  source 1..22: mol_type = other DNA
  modified_base 11: mod_base = OTHER; note = Uracil
  modified_base 16: mod_base = OTHER; note = Uracil
  modified_base 17: mod_base = OTHER; note = Uracil
  modified_base 18: mod_base = OTHER; note = Uracil
  modified_base 20: mod_base = OTHER; note = Uracil
tcaaggaagatggcatttctag

SEQ ID NO: 14023 - DNA, 22 bp, synthetic construct
  misc_feature 1..22: note = Description of Artificial Sequence: Synthetic Antisense oligonucleotide
  misc_feature 1..22: note = Original Sequence: tcaaggaagauggcauuucuag
  modified_base 1..2: mod_base = OTHER; note = bicyclic nucleic acid (BNA)
  modified_base 5: mod_base = OTHER; note = bicyclic nucleic acid (BNA)
  modified_base 12: mod_base = OTHER; note = bicyclic nucleic acid (BNA)
  source 1..22: mol_type = other DNA
  modified_base 11: mod_base = OTHER; note = Uracil
  modified_base 16: mod_base = OTHER; note = Uracil
  modified_base 17: mod_base = OTHER; note = Uracil
  modified_base 18: mod_base = OTHER; note = Uracil
  modified_base 20: mod_base = OTHER; note = Uracil
tcaaggaagatggcatttctag

SEQ ID NO: 14024 - DNA, 22 bp, synthetic construct
  misc_feature 1..22: note = Description of Artificial Sequence: Synthetic Antisense oligonucleotide
  misc_feature 1..22: note = Original Sequence: tcaaggaagauggcauuucuag
  modified_base 1..2: mod_base = OTHER; note = bicyclic nucleic acid (BNA)
  modified_base 9: mod_base = OTHER; note = bicyclic nucleic acid (BNA)
  modified_base 13: mod_base = OTHER; note = bicyclic nucleic acid (BNA)
  source 1..22: mol_type = other DNA
  modified_base 11: mod_base = OTHER; note = Uracil
  modified_base 16: mod_base = OTHER; note = Uracil
  modified_base 17: mod_base = OTHER; note = Uracil
  modified_base 18: mod_base = OTHER; note = Uracil
  modified_base 20: mod_base = OTHER; note = Uracil
tcaaggaagatggcatttctag

SEQ ID NO: 14025 - DNA, 22 bp, synthetic construct
  misc_feature 1..22: note = Description of Artificial Sequence: Synthetic Antisense oligonucleotide
  misc_feature 1..22: note = Original Sequence: tcaaggaagauggcauuucuag
  modified_base 1..2: mod_base = OTHER; note = bicyclic nucleic acid (BNA)
  modified_base 14: mod_base = OTHER; note = bicyclic nucleic acid (BNA)
  modified_base 19: mod_base = OTHER; note = bicyclic nucleic acid (BNA)
  source 1..22: mol_type = other DNA
  modified_base 11: mod_base = OTHER; note = Uracil
  modified_base 16: mod_base = OTHER; note = Uracil
  modified_base 17: mod_base = OTHER; note = Uracil
  modified_base 18: mod_base = OTHER; note = Uracil
  modified_base 20: mod_base = OTHER; note = Uracil
tcaaggaagatggcatttctag

SEQ ID NO: 14026 - DNA, 22 bp, synthetic construct
  misc_feature 1..22: note = Description of Artificial Sequence: Synthetic Antisense oligonucleotide
  misc_feature 1..22: note = Original Sequence: tcaaggaagauggcauuucuag
  modified_base 1..2: mod_base = OTHER; note = bicyclic nucleic acid (BNA)
  modified_base 9: mod_base = OTHER; note = bicyclic nucleic acid (BNA)
  modified_base 19: mod_base = OTHER; note = bicyclic nucleic acid (BNA)
  source 1..22: mol_type = other DNA
  modified_base 11: mod_base = OTHER; note = Uracil
  modified_base 16: mod_base = OTHER; note = Uracil
  modified_base 17: mod_base = OTHER; note = Uracil
  modified_base 18: mod_base = OTHER; note = Uracil
  modified_base 20: mod_base = OTHER; note = Uracil
tcaaggaagatggcatttctag

SEQ ID NO: 14027 - RNA, 18 nt, synthetic construct
  misc_feature 1..18: note = Description of Artificial Sequence: Synthetic Antisense oligonucleotide
  modified_base 1..2: mod_base = OTHER; note = bicyclic nucleic acid (BNA)
  modified_base 9: mod_base = OTHER; note = bicyclic nucleic acid (BNA)
  modified_base 9: mod_base = OTHER; note = 5-methyl
  modified_base 13..14: mod_base = OTHER; note = 5-methyl
  modified_base 18: mod_base = OTHER; note = 5-methyl
  source 1..18: mol_type = other RNA
ggtaagttctgtccaagc

SEQ ID NO: 14028 - RNA, 18 nt, synthetic construct
  misc_feature 1..18: note = Description of Artificial Sequence: Synthetic Antisense oligonucleotide
  modified_base 1..2: mod_base = OTHER; note = bicyclic nucleic acid (BNA)
  modified_base 11: mod_base = OTHER; note = bicyclic nucleic acid (BNA)
  modified_base 9: mod_base = OTHER; note = 5-methyl
  modified_base 13..14: mod_base = OTHER; note = 5-methyl
  modified_base 18: mod_base = OTHER; note = 5-methyl
  source 1..18: mol_type = other RNA
ggtaagttctgtccaagc

SEQ ID NO: 14029 - RNA, 18 nt, synthetic construct
  misc_feature 1..18: note = Description of Artificial Sequence: Synthetic Antisense oligonucleotide
  modified_base 1..2: mod_base = OTHER; note = bicyclic nucleic acid (BNA)
  modified_base 6: mod_base = OTHER; note = bicyclic nucleic acid (BNA)
  modified_base 9: mod_base = OTHER; note = 5-methyl
  modified_base 13..14: mod_base = OTHER; note = 5-methyl
  modified_base 18: mod_base = OTHER; note = 5-methyl
  source 1..18: mol_type = other RNA
ggtaagttctgtccaagc

SEQ ID NO: 14030 - RNA, 18 nt, synthetic construct
  misc_feature 1..18: note = Description of Artificial Sequence: Synthetic Antisense oligonucleotide
  modified_base 1..2: mod_base = OTHER; note = bicyclic nucleic acid (BNA)
  modified_base 17: mod_base = OTHER; note = bicyclic nucleic acid (BNA)
  modified_base 9: mod_base = OTHER; note = 5-methyl
  modified_base 13..14: mod_base = OTHER; note = 5-methyl
  modified_base 18: mod_base = OTHER; note = 5-methyl
  source 1..18: mol_type = other RNA
ggtaagttctgtccaagc

SEQ ID NO: 14031 - RNA, 18 nt, synthetic construct
  misc_feature 1..18: note = Description of Artificial Sequence: Synthetic Antisense oligonucleotide
  modified_base 1..2: mod_base = OTHER; note = bicyclic nucleic acid (BNA)
  modified_base 13: mod_base = OTHER; note = bicyclic nucleic acid (BNA)
  modified_base 9: mod_base = OTHER; note = 5-methyl
  modified_base 13..14: mod_base = OTHER; note = 5-methyl
  modified_base 18: mod_base = OTHER; note = 5-methyl
  source 1..18: mol_type = other RNA
ggtaagttctgtccaagc

SEQ ID NO: 14032 - RNA, 18 nt, synthetic construct
  misc_feature 1..18: note = Description of Artificial Sequence: Synthetic Antisense oligonucleotide
  modified_base 1..2: mod_base = OTHER; note = bicyclic nucleic acid (BNA)
  modified_base 14: mod_base = OTHER; note = bicyclic nucleic acid (BNA)
  modified_base 9: mod_base = OTHER; note = 5-methyl
  modified_base 13..14: mod_base = OTHER; note = 5-methyl
  modified_base 18: mod_base = OTHER; note = 5-methyl
  source 1..18: mol_type = other RNA
ggtaagttctgtccaagc

SEQ ID NO: 14033 - DNA, 18 bp, synthetic construct
  misc_feature 1..18: note = Description of Artificial Sequence: Synthetic Antisense oligonucleotide
  misc_feature 1..18: note = Original Sequence: gtaaguucuguccaagcc
  modified_base 1..2: mod_base = OTHER; note = bicyclic nucleic acid (BNA)
  modified_base 16: mod_base = OTHER; note = bicyclic nucleic acid (BNA)
  modified_base 8: mod_base = OTHER; note = 5-methyl
  modified_base 12..13: mod_base = OTHER; note = 5-methyl
  modified_base 17..18: mod_base = OTHER; note = 5-methyl
  source 1..18: mol_type = other DNA
  modified_base 6: mod_base = OTHER; note = Uracil
  modified_base 7: mod_base = OTHER; note = Uracil
  modified_base 9: mod_base = OTHER; note = Uracil
  modified_base 11: mod_base = OTHER; note = Uracil
gtaagttctgtccaagcc

SEQ ID NO: 14034 - DNA, 18 bp, synthetic construct
  misc_feature 1..18: note = Description of Artificial Sequence: Synthetic Antisense oligonucleotide
  misc_feature 1..18: note = Original Sequence: gtaaguucuguccaagcc
  modified_base 1..2: mod_base = OTHER; note = bicyclic nucleic acid (BNA)
  modified_base 10: mod_base = OTHER; note = bicyclic nucleic acid (BNA)
  modified_base 8: mod_base = OTHER; note = 5-methyl
  modified_base 12..13: mod_base = OTHER; note = 5-methyl
  modified_base 17..18: mod_base = OTHER; note = 5-methyl
  source 1..18: mol_type = other DNA
  modified_base 6: mod_base = OTHER; note = Uracil
  modified_base 7: mod_base = OTHER; note = Uracil
  modified_base 9: mod_base = OTHER; note = Uracil
  modified_base 11: mod_base = OTHER; note = Uracil
gtaagttctgtccaagcc

SEQ ID NO: 14035 - DNA, 18 bp, synthetic construct
  misc_feature 1..18: note = Description of Artificial Sequence: Synthetic Antisense oligonucleotide
  misc_feature 1..18: note = Original Sequence: gtaaguucuguccaagcc
  modified_base 1..2: mod_base = OTHER; note = bicyclic nucleic acid (BNA)
  modified_base 5: mod_base = OTHER; note = bicyclic nucleic acid (BNA)
  modified_base 8: mod_base = OTHER; note = 5-methyl
  modified_base 12..13: mod_base = OTHER; note = 5-methyl
  modified_base 17..18: mod_base = OTHER; note = 5-methyl
  source 1..18: mol_type = other DNA
  modified_base 6: mod_base = OTHER; note = Uracil
  modified_base 7: mod_base = OTHER; note = Uracil
  modified_base 9: mod_base = OTHER; note = Uracil
  modified_base 11: mod_base = OTHER; note = Uracil
gtaagttctgtccaagcc

SEQ ID NO: 14036 - DNA, 18 bp, synthetic construct
  misc_feature 1..18: note = Description of Artificial Sequence: Synthetic Antisense oligonucleotide
  misc_feature 1..18: note = Original Sequence: gtaaguucuguccaagcc
  modified_base 1..2: mod_base = OTHER; note = bicyclic nucleic acid (BNA)
  modified_base 17: mod_base = OTHER; note = bicyclic nucleic acid (BNA)
  modified_base 8: mod_base = OTHER; note = 5-methyl
  modified_base 12..13: mod_base = OTHER; note = 5-methyl
  modified_base 17..18: mod_base = OTHER; note = 5-methyl
  source 1..18: mol_type = other DNA
  modified_base 6: mod_base = OTHER; note = Uracil
  modified_base 7: mod_base = OTHER; note = Uracil
  modified_base 9: mod_base = OTHER; note = Uracil
  modified_base 11: mod_base = OTHER; note = Uracil
gtaagttctgtccaagcc

SEQ ID NO: 14037 - DNA, 18 bp, synthetic construct
  misc_feature 1..18: note = Description of Artificial Sequence: Synthetic Antisense oligonucleotide
  misc_feature 1..18: note = Original Sequence: gtaaguucuguccaagcc
  modified_base 1..2: mod_base = OTHER; note = bicyclic nucleic acid (BNA)
  modified_base 12: mod_base = OTHER; note = bicyclic nucleic acid (BNA)
  modified_base 8: mod_base = OTHER; note = 5-methyl
  modified_base 12..13: mod_base = OTHER; note = 5-methyl
  modified_base 17..18: mod_base = OTHER; note = 5-methyl
  source 1..18: mol_type = other DNA
  modified_base 6: mod_base = OTHER; note = Uracil
  modified_base 7: mod_base = OTHER; note = Uracil
  modified_base 9: mod_base = OTHER; note = Uracil
  modified_base 11: mod_base = OTHER; note = Uracil
gtaagttctgtccaagcc

SEQ ID NO: 14038 - DNA, 18 bp, synthetic construct
  misc_feature 1..18: note = Description of Artificial Sequence: Synthetic Antisense oligonucleotide
  misc_feature 1..18: note = Original Sequence: gtaaguucuguccaagcc
  modified_base 1..2: mod_base = OTHER; note = bicyclic nucleic acid (BNA)
  modified_base 13: mod_base = OTHER; note = bicyclic nucleic acid (BNA)
  modified_base 8: mod_base = OTHER; note = 5-methyl
  modified_base 12..13: mod_base = OTHER; note = 5-methyl
  modified_base 17..18: mod_base = OTHER; note = 5-methyl
  source 1..18: mol_type = other DNA
  modified_base 6: mod_base = OTHER; note = Uracil
  modified_base 7: mod_base = OTHER; note = Uracil
  modified_base 9: mod_base = OTHER; note = Uracil
  modified_base 11: mod_base = OTHER; note = Uracil
gtaagttctgtccaagcc

SEQ ID NO: 14039 - DNA, 18 bp, synthetic construct
  misc_feature 1..18: note = Description of Artificial Sequence: Synthetic Antisense oligonucleotide
  misc_feature 1..18: note = Original Sequence: gtaaguucuguccaagcc
  modified_base 1..2: mod_base = OTHER; note = bicyclic nucleic acid (BNA)
  modified_base 8: mod_base = OTHER; note = bicyclic nucleic acid (BNA)
  modified_base 8: mod_base = OTHER; note = 5-methyl
  modified_base 12..13: mod_base = OTHER; note = 5-methyl
  modified_base 17..18: mod_base = OTHER; note = 5-methyl
  source 1..18: mol_type = other DNA
  modified_base 6: mod_base = OTHER; note = Uracil
  modified_base 7: mod_base = OTHER; note = Uracil
  modified_base 9: mod_base = OTHER; note = Uracil
  modified_base 11: mod_base = OTHER; note = Uracil
gtaagttctgtccaagcc

SEQ ID NO: 14040 - RNA, 18 nt, synthetic construct
  misc_feature 1..18: note = Description of Artificial Sequence: Synthetic Antisense oligonucleotide
  modified_base 1..2: mod_base = OTHER; note = bicyclic nucleic acid (BNA)
  modified_base 4: mod_base = OTHER; note = bicyclic nucleic acid (BNA)
  modified_base 4: mod_base = OTHER; note = 5-methyl
  modified_base 13: mod_base = OTHER; note = 5-methyl
  modified_base 17..18: mod_base = OTHER; note = 5-methyl
  source 1..18: mol_type = other RNA
agtcggtaagttctgtcc

SEQ ID NO: 14041 - RNA, 18 nt, synthetic construct
  misc_feature 1..18: note = Description of Artificial Sequence: Synthetic Antisense oligonucleotide
  modified_base 1..2: mod_base = OTHER; note = bicyclic nucleic acid (BNA)
  modified_base 10: mod_base = OTHER; note = bicyclic nucleic acid (BNA)
  modified_base 4: mod_base = OTHER; note = 5-methyl
  modified_base 13: mod_base = OTHER; note = 5-methyl
  modified_base 17..18: mod_base = OTHER; note = 5-methyl
  source 1..18: mol_type = other RNA
agtcggtaagttctgtcc

SEQ ID NO: 14042 - RNA, 18 nt, synthetic construct
  misc_feature 1..18: note = Description of Artificial Sequence: Synthetic Antisense oligonucleotide
  modified_base 1..2: mod_base = OTHER; note = bicyclic nucleic acid (BNA)
  modified_base 5: mod_base = OTHER; note = bicyclic nucleic acid (BNA)
  modified_base 4: mod_base = OTHER; note = 5-methyl
  modified_base 13: mod_base = OTHER; note = 5-methyl
  modified_base 17..18: mod_base = OTHER; note = 5-methyl
  source 1..18: mol_type = other RNA
agtcggtaagttctgtcc

SEQ ID NO: 14043 - RNA, 18 nt, synthetic construct
  misc_feature 1..18: note = Description of Artificial Sequence: Synthetic Antisense oligonucleotide
  modified_base 1..2: mod_base = OTHER; note = bicyclic nucleic acid (BNA)
  modified_base 6: mod_base = OTHER; note = bicyclic nucleic acid (BNA)
  modified_base 4: mod_base = OTHER; note = 5-methyl
  modified_base 13: mod_base = OTHER; note = 5-methyl
  modified_base 17..18: mod_base = OTHER; note = 5-methyl
  source 1..18: mol_type = other RNA
agtcggtaagttctgtcc

SEQ ID NO: 14044 - RNA, 18 nt, synthetic construct
  misc_feature 1..18: note = Description of Artificial Sequence: Synthetic Antisense oligonucleotide
  modified_base 1..2: mod_base = OTHER; note = bicyclic nucleic acid (BNA)
  modified_base 17: mod_base = OTHER; note = bicyclic nucleic acid (BNA)
  modified_base 4: mod_base = OTHER; note = 5-methyl
  modified_base 13: mod_base = OTHER; note = 5-methyl
  modified_base 17..18: mod_base = OTHER; note = 5-methyl
  source 1..18: mol_type = other RNA
agtcggtaagttctgtcc

SEQ ID NO: 14045 - RNA, 18 nt, synthetic construct
  misc_feature 1..18: note = Description of Artificial Sequence: Synthetic Antisense oligonucleotide
  modified_base 1..2: mod_base = OTHER; note = bicyclic nucleic acid (BNA)
  modified_base 13: mod_base = OTHER; note = bicyclic nucleic acid (BNA)
  modified_base 4: mod_base = OTHER; note = 5-methyl
  modified_base 13: mod_base = OTHER; note = 5-methyl
  modified_base 17..18: mod_base = OTHER; note = 5-methyl
  source 1..18: mol_type = other RNA
agtcggtaagttctgtcc

SEQ ID NO: 14046 - RNA, 18 nt, synthetic construct
  misc_feature 1..18: note = Description of Artificial Sequence: Synthetic Antisense oligonucleotide
  modified_base 1..2: mod_base = OTHER; note = bicyclic nucleic acid (BNA)
  modified_base 15: mod_base = OTHER; note = bicyclic nucleic acid (BNA)
  modified_base 4: mod_base = OTHER; note = 5-methyl
  modified_base 13: mod_base = OTHER; note = 5-methyl
  modified_base 17..18: mod_base = OTHER; note = 5-methyl
  source 1..18: mol_type = other RNA
agtcggtaagttctgtcc

SEQ ID NO: 14047 - DNA, 18 bp, synthetic construct
  misc_feature 1..18: note = Description of Artificial Sequence: Synthetic Antisense oligonucleotide
  misc_feature 1..18: note = Original Sequence: ctguccaagcccgguuga
  modified_base 1: mod_base = OTHER; note = 5-methyl
  modified_base 5..6: mod_base = OTHER; note = 5-methyl
  modified_base 10..12: mod_base = OTHER; note = 5-methyl
  modified_base 1..3: mod_base = OTHER; note = bicyclic nucleic acid (BNA)
  source 1..18: mol_type = other DNA
  modified_base 4: mod_base = OTHER; note = Uracil
  modified_base 15: mod_base = OTHER; note = Uracil
  modified_base 16: mod_base = OTHER; note = Uracil
ctgtccaagcccggttga

SEQ ID NO: 14048 - DNA, 18 bp, synthetic construct
  misc_feature 1..18: note = Description of Artificial Sequence: Synthetic Antisense oligonucleotide
  misc_feature 1..18: note = Original Sequence: ctguccaagcccgguuga
  modified_base 1: mod_base = OTHER; note = 5-methyl
  modified_base 5..6: mod_base = OTHER; note = 5-methyl
  modified_base 10..12: mod_base = OTHER; note = 5-methyl
  modified_base 1..2: mod_base = OTHER; note = bicyclic nucleic acid (BNA)
  modified_base 9: mod_base = OTHER; note = bicyclic nucleic acid (BNA)
  source 1..18: mol_type = other DNA
  modified_base 4: mod_base = OTHER; note = Uracil
  modified_base 15: mod_base = OTHER; note = Uracil
  modified_base 16: mod_base = OTHER; note = Uracil
ctgtccaagcccggttga

SEQ ID NO: 14049 - DNA, 18 bp, synthetic construct
  misc_feature 1..18: note = Description of Artificial Sequence: Synthetic Antisense oligonucleotide
  misc_feature 1..18: note = Original Sequence: ctguccaagcccgguuga
  modified_base 1: mod_base = OTHER; note = 5-methyl
  modified_base 5..6: mod_base = OTHER; note = 5-methyl
  modified_base 10..12: mod_base = OTHER; note = 5-methyl
  modified_base 1..2: mod_base = OTHER; note = bicyclic nucleic acid (BNA)
  modified_base 10: mod_base = OTHER; note = bicyclic nucleic acid (BNA)
  source 1..18: mol_type = other DNA
  modified_base 4: mod_base = OTHER; note = Uracil
  modified_base 15: mod_base = OTHER; note = Uracil
  modified_base 16: mod_base = OTHER; note = Uracil
ctgtccaagcccggttga

SEQ ID NO: 14050 - DNA, 18 bp, synthetic construct
  misc_feature 1..18: note = Description of Artificial Sequence: Synthetic Antisense oligonucleotide
  misc_feature 1..18: note = Original Sequence: ctguccaagcccgguuga
  modified_base 1: mod_base = OTHER; note = 5-methyl
  modified_base 5..6: mod_base = OTHER; note = 5-methyl
  modified_base 10..12: mod_base = OTHER; note = 5-methyl
  modified_base 1..2: mod_base = OTHER; note = bicyclic nucleic acid (BNA)
  modified_base 5: mod_base = OTHER; note = bicyclic nucleic acid (BNA)
  source 1..18: mol_type = other DNA
  modified_base 4: mod_base = OTHER; note = Uracil
  modified_base 15: mod_base = OTHER; note = Uracil
  modified_base 16: mod_base = OTHER; note = Uracil
ctgtccaagcccggttga

SEQ ID NO: 14051 - DNA, 18 bp, synthetic construct
  misc_feature 1..18: note = Description of Artificial Sequence: Synthetic Antisense oligonucleotide
  misc_feature 1..18: note = Original Sequence: ctguccaagcccgguuga
  modified_base 1: mod_base = OTHER; note = 5-methyl
  modified_base 5..6: mod_base = OTHER; note = 5-methyl
  modified_base 10..12: mod_base = OTHER; note = 5-methyl
  modified_base 1..2: mod_base = OTHER; note = bicyclic nucleic acid (BNA)
  modified_base 11: mod_base = OTHER; note = bicyclic nucleic acid (BNA)
  source 1..18: mol_type = other DNA
  modified_base 4: mod_base = OTHER; note = Uracil
  modified_base 15: mod_base = OTHER; note = Uracil
  modified_base 16: mod_base = OTHER; note = Uracil
ctgtccaagcccggttga

SEQ ID NO: 14052 - DNA, 18 bp, synthetic construct
  misc_feature 1..18: note = Description of Artificial Sequence: Synthetic Antisense oligonucleotide
  misc_feature 1..18: note = Original Sequence: ctguccaagcccgguuga
  modified_base 1: mod_base = OTHER; note = 5-methyl
  modified_base 5..6: mod_base = OTHER; note = 5-methyl
  modified_base 10..12: mod_base = OTHER; note = 5-methyl
  modified_base 1..2: mod_base = OTHER; note = bicyclic nucleic acid (BNA)
  modified_base 6: mod_base = OTHER; note = bicyclic nucleic acid (BNA)
  source 1..18: mol_type = other DNA
  modified_base 4: mod_base = OTHER; note = Uracil
  modified_base 15: mod_base = OTHER; note = Uracil
  modified_base 16: mod_base = OTHER; note = Uracil
ctgtccaagcccggttga

SEQ ID NO: 14053 - DNA, 18 bp, synthetic construct
  misc_feature 1..18: note = Description of Artificial Sequence: Synthetic Antisense oligonucleotide
  misc_feature 1..18: note = Original Sequence: ctguccaagcccgguuga
  modified_base 1: mod_base = OTHER; note = 5-methyl
  modified_base 5..6: mod_base = OTHER; note = 5-methyl
  modified_base 10..12: mod_base = OTHER; note = 5-methyl
  modified_base 1..2: mod_base = OTHER; note = bicyclic nucleic acid (BNA)
  modified_base 17: mod_base = OTHER; note = bicyclic nucleic acid (BNA)
  source 1..18: mol_type = other DNA
  modified_base 4: mod_base = OTHER; note = Uracil
  modified_base 15: mod_base = OTHER; note = Uracil
  modified_base 16: mod_base = OTHER; note = Uracil
ctgtccaagcccggttga

SEQ ID NO: 14054 - DNA, 18 bp, synthetic construct
  misc_feature 1..18: note = Description of Artificial Sequence: Synthetic Antisense oligonucleotide
  misc_feature 1..18: note = Original Sequence: ctguccaagcccgguuga
  modified_base 1: mod_base = OTHER; note = 5-methyl
  modified_base 5..6: mod_base = OTHER; note = 5-methyl
  modified_base 10..12: mod_base = OTHER; note = 5-methyl
  modified_base 1..2: mod_base = OTHER; note = bicyclic nucleic acid (BNA)
  modified_base 12: mod_base = OTHER; note = bicyclic nucleic acid (BNA)
  source 1..18: mol_type = other DNA
  modified_base 4: mod_base = OTHER; note = Uracil
  modified_base 15: mod_base = OTHER; note = Uracil
  modified_base 16: mod_base = OTHER; note = Uracil
ctgtccaagcccggttga

SEQ ID NO: 14055 - DNA, 18 bp, synthetic construct
  misc_feature 1..18: note = Description of Artificial Sequence: Synthetic Antisense oligonucleotide
  misc_feature 1..18: note = Original Sequence: ctguccaagcccgguuga
  modified_base 1: mod_base = OTHER; note = 5-methyl
  modified_base 5..6: mod_base = OTHER; note = 5-methyl
  modified_base 10..12: mod_base = OTHER; note = 5-methyl
  modified_base 1..2: mod_base = OTHER; note = bicyclic nucleic acid (BNA)
  modified_base 13: mod_base = OTHER; note = bicyclic nucleic acid (BNA)
  source 1..18: mol_type = other DNA
  modified_base 4: mod_base = OTHER; note = Uracil
  modified_base 15: mod_base = OTHER; note = Uracil
  modified_base 16: mod_base = OTHER; note = Uracil
ctgtccaagcccggttga

SEQ ID NO: 14056 - DNA, 18 bp, synthetic construct
  misc_feature 1..18: note = Description of Artificial Sequence: Synthetic Antisense oligonucleotide
  misc_feature 1..18: note = Original Sequence: ctguccaagcccgguuga
  modified_base 1: mod_base = OTHER; note = 5-methyl
  modified_base 5..6: mod_base = OTHER; note = 5-methyl
  modified_base 10..12: mod_base = OTHER; note = 5-methyl
  modified_base 1..2: mod_base = OTHER; note = bicyclic nucleic acid (BNA)
  modified_base 14: mod_base = OTHER; note = bicyclic nucleic acid (BNA)
  source 1..18: mol_type = other DNA
  modified_base 4: mod_base = OTHER; note = Uracil
  modified_base 15: mod_base = OTHER; note = Uracil
  modified_base 16: mod_base = OTHER; note = Uracil
ctgtccaagcccggttga

SEQ ID NO: 14057 - RNA, 18 nt, synthetic construct
  misc_feature 1..18: note = Description of Artificial Sequence: Synthetic Antisense oligonucleotide
  modified_base 1..2: mod_base = OTHER; note = bicyclic nucleic acid (BNA)
  modified_base 6: mod_base = OTHER; note = bicyclic nucleic acid (BNA)
  modified_base 11: mod_base = OTHER; note = bicyclic nucleic acid (BNA)
  modified_base 9: mod_base = OTHER; note = 5-methyl
  modified_base 13..14: mod_base = OTHER; note = 5-methyl
  modified_base 18: mod_base = OTHER; note = 5-methyl
  source 1..18: mol_type = other RNA
ggtaagttctgtccaagc

SEQ ID NO: 14058 - RNA, 18 nt, synthetic construct
  misc_feature 1..18: note = Description of Artificial Sequence: Synthetic Antisense oligonucleotide
  modified_base 1..2: mod_base = OTHER; note = bicyclic nucleic acid (BNA)
  modified_base 9: mod_base = OTHER; note = bicyclic nucleic acid (BNA)
  modified_base 14: mod_base = OTHER; note = bicyclic nucleic acid (BNA)
  modified_base 9: mod_base = OTHER; note = 5-methyl
  modified_base 13..14: mod_base = OTHER; note = 5-methyl
  modified_base 18: mod_base = OTHER; note = 5-methyl
  source 1..18: mol_type = other RNA
ggtaagttctgtccaagc

SEQ ID NO: 14059 - RNA, 18 nt, synthetic construct
  misc_feature 1..18: note = Description of Artificial Sequence: Synthetic Antisense oligonucleotide
  modified_base 1..2: mod_base = OTHER; note = bicyclic nucleic acid (BNA)
  modified_base 6: mod_base = OTHER; note = bicyclic nucleic acid (BNA)
  modified_base 17: mod_base = OTHER; note = bicyclic nucleic acid (BNA)
  modified_base 9: mod_base = OTHER; note = 5-methyl
  modified_base 13..14: mod_base = OTHER; note = 5-methyl
  modified_base 18: mod_base = OTHER; note = 5-methyl
  source 1..18: mol_type = other RNA
ggtaagttctgtccaagc

SEQ ID NO: 14060 - RNA, 18 nt, synthetic construct
  misc_feature 1..18: note = Description of Artificial Sequence: Synthetic Antisense oligonucleotide
  modified_base 1..2: mod_base = OTHER; note = bicyclic nucleic acid (BNA)
  modified_base 9: mod_base = OTHER; note = bicyclic nucleic acid (BNA)
  modified_base 13: mod_base = OTHER; note = bicyclic nucleic acid (BNA)
  modified_base 9: mod_base = OTHER; note = 5-methyl
  modified_base 13..14: mod_base = OTHER; note = 5-methyl
  modified_base 18: mod_base = OTHER; note = 5-methyl
  source 1..18: mol_type = other RNA
ggtaagttctgtccaagc

SEQ ID NO: 14061 - RNA, 18 nt, synthetic construct
  misc_feature 1..18: note = Description of Artificial Sequence: Synthetic Antisense oligonucleotide
  modified_base 1..2: mod_base = OTHER; note = bicyclic nucleic acid (BNA)
  modified_base 13..14: mod_base = OTHER; note = bicyclic nucleic acid (BNA)
  modified_base 9: mod_base = OTHER; note = 5-methyl
  modified_base 13..14: mod_base = OTHER; note = 5-methyl
  modified_base 18: mod_base = OTHER; note = 5-methyl
  source 1..18: mol_type = other RNA
ggtaagttctgtccaagc

SEQ ID NO: 14062 - RNA, 18 nt, synthetic construct
  misc_feature 1..18: note = Description of Artificial Sequence: Synthetic Antisense oligonucleotide
  modified_base 1..2: mod_base = OTHER; note = bicyclic nucleic acid (BNA)
  modified_base 11: mod_base = OTHER; note = bicyclic nucleic acid (BNA)
  modified_base 17: mod_base = OTHER; note = bicyclic nucleic acid (BNA)
  modified_base 9: mod_base = OTHER; note = 5-methyl
  modified_base 13..14: mod_base = OTHER; note = 5-methyl
  modified_base 18: mod_base = OTHER; note = 5-methyl
  source 1..18: mol_type = other RNA
ggtaagttctgtccaagc

SEQ ID NO: 14063 - RNA, 18 nt, synthetic construct
  misc_feature 1..18: note = Description of Artificial Sequence: Synthetic Antisense oligonucleotide
  modified_base 1..2: mod_base = OTHER; note = bicyclic nucleic acid (BNA)
  modified_base 11: mod_base = OTHER; note = bicyclic nucleic acid (BNA)
  modified_base 14: mod_base = OTHER; note = bicyclic nucleic acid (BNA)
  modified_base 9: mod_base = OTHER; note = 5-methyl
  modified_base 13..14: mod_base = OTHER; note = 5-methyl
  modified_base 18: mod_base = OTHER; note = 5-methyl
  source 1..18: mol_type = other RNA
ggtaagttctgtccaagc

SEQ ID NO: 14064 - RNA, 18 nt, synthetic construct
  misc_feature 1..18: note = Description of Artificial Sequence: Synthetic Antisense oligonucleotide
  modified_base 1..2: mod_base = OTHER; note = bicyclic nucleic acid (BNA)
  modified_base 6: mod_base = OTHER; note = bicyclic nucleic acid (BNA)
  modified_base 13: mod_base = OTHER; note = bicyclic nucleic acid (BNA)
  modified_base 9: mod_base = OTHER; note = 5-methyl
  modified_base 13..14: mod_base = OTHER; note = 5-methyl
  modified_base 18: mod_base = OTHER; note = 5-methyl
  source 1..18: mol_type = other RNA
ggtaagttctgtccaagc

SEQ ID NO: 14065 - RNA, 18 nt, synthetic construct
  misc_feature 1..18: note = Description of Artificial Sequence: Synthetic Antisense oligonucleotide
  modified_base 1..2: mod_base = OTHER; note = bicyclic nucleic acid (BNA)
  modified_base 6: mod_base = OTHER; note = bicyclic nucleic acid (BNA)
  modified_base 14: mod_base = OTHER; note = bicyclic nucleic acid (BNA)
  modified_base 9: mod_base = OTHER; note = 5-methyl
  modified_base 13..14: mod_base = OTHER; note = 5-methyl
  modified_base 18: mod_base = OTHER; note = 5-methyl
  source 1..18: mol_type = other RNA
ggtaagttctgtccaagc

SEQ ID NO: 14066 - RNA, 18 nt, synthetic construct
  misc_feature 1..18: note = Description of Artificial Sequence: Synthetic Antisense oligonucleotide
  modified_base 1..2: mod_base = OTHER; note = bicyclic nucleic acid (BNA)
  modified_base 14: mod_base = OTHER; note = bicyclic nucleic acid (BNA)
  modified_base 17: mod_base = OTHER; note = bicyclic nucleic acid (BNA)
  modified_base 9: mod_base = OTHER; note = 5-methyl
  modified_base 13..14: mod_base = OTHER; note = 5-methyl
  modified_base 18: mod_base = OTHER; note = 5-methyl
  source 1..18: mol_type = other RNA
ggtaagttctgtccaagc

SEQ ID NO: 14067 - RNA, 18 nt, synthetic construct
  misc_feature 1..18: note = Description of Artificial Sequence: Synthetic Antisense oligonucleotide
  modified_base 1..2: mod_base = OTHER; note = bicyclic nucleic acid (BNA)
  modified_base 9: mod_base = OTHER; note = bicyclic nucleic acid (BNA)
  modified_base 11: mod_base = OTHER; note = bicyclic nucleic acid (BNA)
  modified_base 9: mod_base = OTHER; note = 5-methyl
  modified_base 13..14: mod_base = OTHER; note = 5-methyl
  modified_base 18: mod_base = OTHER; note = 5-methyl
  source 1..18: mol_type = other RNA
ggtaagttctgtccaagc

SEQ ID NO: 14068 - RNA, 18 nt, synthetic construct
  misc_feature 1..18: note = Description of Artificial Sequence: Synthetic Antisense oligonucleotide
  modified_base 1..2: mod_base = OTHER; note = bicyclic nucleic acid (BNA)
  modified_base 11: mod_base = OTHER; note = bicyclic nucleic acid (BNA)
  modified_base 13: mod_base = OTHER; note = bicyclic nucleic acid (BNA)
  modified_base 9: mod_base = OTHER; note = 5-methyl
  modified_base 13..14: mod_base = OTHER; note = 5-methyl
  modified_base 18: mod_base = OTHER; note = 5-methyl
  source 1..18: mol_type = other RNA
ggtaagttctgtccaagc

SEQ ID NO: 14069 - RNA, 18 nt, synthetic construct
  misc_feature 1..18: note = Description of Artificial Sequence: Synthetic Antisense oligonucleotide
  modified_base 1..2: mod_base = OTHER; note = bicyclic nucleic acid (BNA)
  modified_base 13: mod_base = OTHER; note = bicyclic nucleic acid (BNA)
  modified_base 17: mod_base = OTHER; note = bicyclic nucleic acid (BNA)
  modified_base 9: mod_base = OTHER; note = 5-methyl
  modified_base 13..14: mod_base = OTHER; note = 5-methyl
  modified_base 18: mod_base = OTHER; note = 5-methyl
  source 1..18: mol_type = other RNA
ggtaagttctgtccaagc

SEQ ID NO: 14070 - RNA, 18 nt, synthetic construct
  misc_feature 1..18: note = Description of Artificial Sequence: Synthetic Antisense oligonucleotide
  modified_base 1..2: mod_base = OTHER; note = bicyclic nucleic acid (BNA)
  modified_base 9: mod_base = OTHER; note = bicyclic nucleic acid (BNA)
  modified_base 17: mod_base = OTHER; note = bicyclic nucleic acid (BNA)
  modified_base 9: mod_base = OTHER; note = 5-methyl
  modified_base 13..14: mod_base = OTHER; note = 5-methyl
  modified_base 18: mod_base = OTHER; note = 5-methyl
  source 1..18: mol_type = other RNA
ggtaagttctgtccaagc

SEQ ID NO: 14071 - RNA, 18 nt, synthetic construct
  misc_feature 1..18: note = Description of Artificial Sequence: Synthetic Antisense oligonucleotide
  modified_base 1..2: mod_base = OTHER; note = bicyclic nucleic acid (BNA)
  modified_base 6: mod_base = OTHER; note = bicyclic nucleic acid (BNA)
  modified_base 9: mod_base = OTHER; note = bicyclic nucleic acid (BNA)
  modified_base 9: mod_base = OTHER; note = 5-methyl
  modified_base 13..14: mod_base = OTHER; note = 5-methyl
  modified_base 18: mod_base = OTHER; note = 5-methyl
  source 1..18: mol_type = other RNA
ggtaagttctgtccaagc

SEQ ID NO: 14072 - DNA, 18 bp, synthetic construct
  misc_feature 1..18: note = Description of Artificial Sequence: Synthetic Antisense oligonucleotide
  misc_feature 1..18: note = Original Sequence: gtaaguucuguccaagcc
  modified_base 1..2: mod_base = OTHER; note = bicyclic nucleic acid (BNA)
  modified_base 12: mod_base = OTHER; note = bicyclic nucleic acid (BNA)
  modified_base 17: mod_base = OTHER; note = bicyclic nucleic acid (BNA)
  modified_base 8: mod_base = OTHER; note = 5-methyl
  modified_base 12..13: mod_base = OTHER; note = 5-methyl
  modified_base 17..18: mod_base = OTHER; note = 5-methyl
  source 1..18: mol_type = other DNA
  modified_base 6: mod_base = OTHER; note = Uracil
  modified_base 7: mod_base = OTHER; note = Uracil
  modified_base 9: mod_base = OTHER; note = Uracil
  modified_base 11: mod_base = OTHER; note = Uracil
gtaagttctgtccaagcc

SEQ ID NO: 14073 - DNA, 18 bp, synthetic construct
  misc_feature 1..18: note = Description of Artificial Sequence: Synthetic Antisense oligonucleotide
  misc_feature 1..18: note = Original Sequence: gtaaguucuguccaagcc
  modified_base 1..2: mod_base = OTHER; note = bicyclic nucleic acid (BNA)
  modified_base 5: mod_base = OTHER; note = bicyclic nucleic acid (BNA)
  modified_base 8: mod_base = OTHER; note = bicyclic nucleic acid (BNA)
  modified_base 8: mod_base = OTHER; note = 5-methyl
  modified_base 12..13: mod_base = OTHER; note = 5-methyl
  modified_base 17..18: mod_base = OTHER; note = 5-methyl
  source 1..18: mol_type = other DNA
  modified_base 6: mod_base = OTHER; note = Uracil
  modified_base 7: mod_base = OTHER; note = Uracil
  modified_base 9: mod_base = OTHER; note = Uracil
  modified_base 11: mod_base = OTHER; note = Uracil
gtaagttctgtccaagcc

SEQ ID NO: 14074 - DNA, 18 bp, synthetic construct
  misc_feature 1..18: note = Description of Artificial Sequence: Synthetic Antisense oligonucleotide
  misc_feature 1..18: note = Original Sequence: gtaaguucuguccaagcc
  modified_base 1..2: mod_base = OTHER; note = bicyclic nucleic acid (BNA)
  modified_base 8: mod_base = OTHER; note = bicyclic nucleic acid (BNA)
  modified_base 13: mod_base = OTHER; note = bicyclic nucleic acid (BNA)
  modified_base 8: mod_base = OTHER; note = 5-methyl
  modified_base 12..13: mod_base = OTHER; note = 5-methyl
  modified_base 17..18: mod_base = OTHER; note = 5-methyl
  source 1..18: mol_type = other DNA
  modified_base 6: mod_base = OTHER; note = Uracil
  modified_base 7: mod_base = OTHER; note = Uracil
  modified_base 9: mod_base = OTHER; note = Uracil
  modified_base 11: mod_base = OTHER; note = Uracil
gtaagttctgtccaagcc

SEQ ID NO: 14075 - DNA, 18 bp, synthetic construct
  misc_feature 1..18: note = Description of Artificial Sequence: Synthetic Antisense oligonucleotide
  misc_feature 1..18: note = Original Sequence: gtaaguucuguccaagcc
  modified_base 1..2: mod_base = OTHER; note = bicyclic nucleic acid (BNA)
  modified_base 5: mod_base = OTHER; note = bicyclic nucleic acid (BNA)
  modified_base 13: mod_base = OTHER; note = bicyclic nucleic acid (BNA)
  modified_base 8: mod_base = OTHER; note = 5-methyl
  modified_base 12..13: mod_base = OTHER; note = 5-methyl
  modified_base 17..18: mod_base = OTHER; note = 5-methyl
  source 1..18: mol_type = other DNA
  modified_base 6: mod_base = OTHER; note = Uracil
  modified_base 7: mod_base = OTHER; note = Uracil
  modified_base 9: mod_base = OTHER; note = Uracil
  modified_base 11: mod_base = OTHER; note = Uracil
gtaagttctgtccaagcc

SEQ ID NO: 14076 - DNA, 18 bp, synthetic construct
  misc_feature 1..18: note = Description of Artificial Sequence: Synthetic Antisense oligonucleotide
  misc_feature 1..18: note = Original Sequence: gtaaguucuguccaagcc
  modified_base 1..2: mod_base = OTHER; note = bicyclic nucleic acid (BNA)
  modified_base 8: mod_base = OTHER; note = bicyclic nucleic acid (BNA)
  modified_base 17: mod_base = OTHER; note = bicyclic nucleic acid (BNA)
  modified_base 8: mod_base = OTHER; note = 5-methyl
  modified_base 12..13: mod_base = OTHER; note = 5-methyl
  modified_base 17..18: mod_base = OTHER; note = 5-methyl
  source 1..18: mol_type = other DNA
  modified_base 6: mod_base = OTHER; note = Uracil
  modified_base 7: mod_base = OTHER; note = Uracil
  modified_base 9: mod_base = OTHER; note = Uracil
  modified_base 11: mod_base = OTHER; note = Uracil
gtaagttctgtccaagcc

SEQ ID NO: 14077 - DNA, 18 bp, synthetic construct
  misc_feature 1..18: note = Description of Artificial Sequence: Synthetic Antisense oligonucleotide
  misc_feature 1..18: note = Original Sequence: gtaaguucuguccaagcc
  modified_base 1..2: mod_base = OTHER; note = bicyclic nucleic acid (BNA)
  modified_base 13: mod_base = OTHER; note = bicyclic nucleic acid (BNA)
  modified_base 17: mod_base = OTHER; note = bicyclic nucleic acid (BNA)
  modified_base 8: mod_base = OTHER; note = 5-methyl
  modified_base 12..13: mod_base = OTHER; note = 5-methyl
  modified_base 17..18: mod_base = OTHER; note = 5-methyl
  source 1..18: mol_type = other DNA
  modified_base 6: mod_base = OTHER; note = Uracil
  modified_base 7: mod_base = OTHER; note = Uracil
  modified_base 9: mod_base = OTHER; note = Uracil
  modified_base 11: mod_base = OTHER; note = Uracil
gtaagttctgtccaagcc

SEQ ID NO: 14078 - DNA, 18 bp, synthetic construct
  misc_feature 1..18: note = Description of Artificial Sequence: Synthetic Antisense oligonucleotide
  misc_feature 1..18: note = Original Sequence: gtaaguucuguccaagcc
  modified_base 1..2: mod_base = OTHER; note = bicyclic nucleic acid (BNA)
  modified_base 8: mod_base = OTHER; note = bicyclic nucleic acid (BNA)
  modified_base 12: mod_base = OTHER; note = bicyclic nucleic acid (BNA)
  modified_base 8: mod_base = OTHER; note = 5-methyl
  modified_base 12..13: mod_base = OTHER; note = 5-methyl
  modified_base 17..18: mod_base = OTHER; note = 5-methyl
  source 1..18: mol_type = other DNA
  modified_base 6: mod_base = OTHER; note = Uracil
  modified_base 7: mod_base = OTHER; note = Uracil
  modified_base 9: mod_base = OTHER; note = Uracil
  modified_base 11: mod_base = OTHER; note = Uracil
gtaagttctgtccaagcc

SEQ ID NO: 14079 - DNA, 18 bp, synthetic construct
  misc_feature 1..18: note = Description of Artificial Sequence: Synthetic Antisense oligonucleotide
  misc_feature 1..18: note = Original Sequence: gtaaguucuguccaagcc
  modified_base 1..2: mod_base = OTHER; note = bicyclic nucleic acid (BNA)
  modified_base 5: mod_base = OTHER; note = bicyclic nucleic acid (BNA)
  modified_base 10: mod_base = OTHER; note = bicyclic nucleic acid (BNA)
  modified_base 8: mod_base = OTHER; note = 5-methyl
  modified_base 12..13: mod_base = OTHER; note = 5-methyl
  modified_base 17..18: mod_base = OTHER; note = 5-methyl
  source 1..18: mol_type = other DNA
  modified_base 6: mod_base = OTHER; note = Uracil
  modified_base 7: mod_base = OTHER; note = Uracil
  modified_base 9: mod_base = OTHER; note = Uracil
  modified_base 11: mod_base = OTHER; note = Uracil
gtaagttctgtccaagcc

SEQ ID NO: 14080 - DNA, 18 bp, synthetic construct
  misc_feature 1..18: note = Description of Artificial Sequence: Synthetic Antisense oligonucleotide
  misc_feature 1..18: note = Original Sequence: gtaaguucuguccaagcc
  modified_base 1..2: mod_base = OTHER; note = bicyclic nucleic acid (BNA)
  modified_base 8: mod_base = OTHER; note = bicyclic nucleic acid (BNA)
  modified_base 16: mod_base = OTHER; note = bicyclic nucleic acid (BNA)
  modified_base 8: mod_base = OTHER; note = 5-methyl
  modified_base 12..13: mod_base = OTHER; note = 5-methyl
  modified_base 17..18: mod_base = OTHER; note = 5-methyl
  source 1..18: mol_type = other DNA
  modified_base 6: mod_base = OTHER; note = Uracil
  modified_base 7: mod_base = OTHER; note = Uracil
  modified_base 9: mod_base = OTHER; note = Uracil
  modified_base 11: mod_base = OTHER; note = Uracil
gtaagttctgtccaagcc

SEQ ID NO: 14081 - DNA, 18 bp, synthetic construct
  misc_feature 1..18: note = Description of Artificial Sequence: Synthetic Antisense oligonucleotide
  misc_feature 1..18: note = Original Sequence: gtaaguucuguccaagcc
  modified_base 1..2: mod_base = OTHER; note = bicyclic nucleic acid (BNA)
  modified_base 10: mod_base = OTHER; note = bicyclic nucleic acid (BNA)
  modified_base 16: mod_base = OTHER; note = bicyclic nucleic acid (BNA)
  modified_base 8: mod_base = OTHER; note = 5-methyl
  modified_base 12..13: mod_base = OTHER; note = 5-methyl
  modified_base 17..18: mod_base = OTHER; note = 5-methyl
  source 1..18: mol_type = other DNA
  modified_base 6: mod_base = OTHER; note = Uracil
  modified_base 7: mod_base = OTHER; note = Uracil
  modified_base 9: mod_base = OTHER; note = Uracil
  modified_base 11: mod_base = OTHER; note = Uracil
gtaagttctgtccaagcc

SEQ ID NO: 14082 - DNA, 18 bp, synthetic construct
  misc_feature 1..18: note = Description of Artificial Sequence: Synthetic Antisense oligonucleotide
  misc_feature 1..18: note = Original Sequence: gtaaguucuguccaagcc
  modified_base 1..2: mod_base = OTHER; note = bicyclic nucleic acid (BNA)
  modified_base 10: mod_base = OTHER; note = bicyclic nucleic acid (BNA)
  modified_base 12: mod_base = OTHER; note = bicyclic nucleic acid (BNA)
  modified_base 8: mod_base = OTHER; note = 5-methyl
  modified_base 12..13: mod_base = OTHER; note = 5-methyl
  modified_base 17..18: mod_base = OTHER; note = 5-methyl
  source 1..18: mol_type = other DNA
  modified_base 6: mod_base = OTHER; note = Uracil
  modified_base 7: mod_base = OTHER; note = Uracil
  modified_base 9: mod_base = OTHER; note = Uracil
  modified_base 11: mod_base = OTHER; note = Uracil
gtaagttctgtccaagcc

SEQ ID NO: 14083 - DNA, 18 bp, synthetic construct
  misc_feature 1..18: note = Description of Artificial Sequence: Synthetic Antisense oligonucleotide
  misc_feature 1..18: note = Original Sequence: gtaaguucuguccaagcc
  modified_base 1..2: mod_base = OTHER; note = bicyclic nucleic acid (BNA)
  modified_base 5: mod_base = OTHER; note = bicyclic nucleic acid (BNA)
  modified_base 17: mod_base = OTHER; note = bicyclic nucleic acid (BNA)
  modified_base 8: mod_base = OTHER; note = 5-methyl
  modified_base 12..13: mod_base = OTHER; note = 5-methyl
  modified_base 17..18: mod_base = OTHER; note = 5-methyl
  source 1..18: mol_type = other DNA
  modified_base 6: mod_base = OTHER; note = Uracil
  modified_base 7: mod_base = OTHER; note = Uracil
  modified_base 9: mod_base = OTHER; note = Uracil
  modified_base 11: mod_base = OTHER; note = Uracil
gtaagttctgtccaagcc

SEQ ID NO: 14084 - DNA, 18 bp, synthetic construct
  misc_feature 1..18: note = Description of Artificial Sequence: Synthetic Antisense oligonucleotide
  misc_feature 1..18: note = Original Sequence: gtaaguucuguccaagcc
  modified_base 1..2: mod_base = OTHER; note = bicyclic nucleic acid (BNA)
  modified_base 10: mod_base = OTHER; note = bicyclic nucleic acid (BNA)
  modified_base 17: mod_base = OTHER; note = bicyclic nucleic acid (BNA)
  modified_base 8: mod_base = OTHER; note = 5-methyl
  modified_base 12..13: mod_base = OTHER; note = 5-methyl
  modified_base 17..18: mod_base = OTHER; note = 5-methyl
  source 1..18: mol_type = other DNA
  modified_base 6: mod_base = OTHER; note = Uracil
  modified_base 7: mod_base = OTHER; note = Uracil
  modified_base 9: mod_base = OTHER; note = Uracil
  modified_base 11: mod_base = OTHER; note = Uracil
gtaagttctgtccaagcc

SEQ ID NO: 14085 - DNA, 18 bp, synthetic construct
  misc_feature 1..18: note = Description of Artificial Sequence: Synthetic Antisense oligonucleotide
  misc_feature 1..18: note = Original Sequence: gtaaguucuguccaagcc
  modified_base 1..2: mod_base = OTHER; note = bicyclic nucleic acid (BNA)
  modified_base 12..13: mod_base = OTHER; note = bicyclic nucleic acid (BNA)
  modified_base 8: mod_base = OTHER; note = 5-methyl
  modified_base 12..13: mod_base = OTHER; note = 5-methyl
  modified_base 17..18: mod_base = OTHER; note = 5-methyl
  source 1..18: mol_type = other DNA
  modified_base 6: mod_base = OTHER; note = Uracil
  modified_base 7: mod_base = OTHER; note = Uracil
  modified_base 9: mod_base = OTHER; note = Uracil
  modified_base 11: mod_base = OTHER; note = Uracil
gtaagttctgtccaagcc

SEQ ID NO: 14086 - DNA, 18 bp, synthetic construct
  misc_feature 1..18: note = Description of Artificial Sequence: Synthetic Antisense oligonucleotide
  misc_feature 1..18: note = Original Sequence: gtaaguucuguccaagcc
  modified_base 1..2: mod_base = OTHER; note = bicyclic nucleic acid (BNA)
  modified_base 5: mod_base = OTHER; note = bicyclic nucleic acid (BNA)
  modified_base 12: mod_base = OTHER; note = bicyclic nucleic acid (BNA)
  modified_base 8: mod_base = OTHER; note = 5-methyl
  modified_base 12..13: mod_base = OTHER; note = 5-methyl
  modified_base 17..18: mod_base = OTHER; note = 5-methyl
  source 1..18: mol_type = other DNA
  modified_base 6: mod_base = OTHER; note = Uracil
  modified_base 7: mod_base = OTHER; note = Uracil
  modified_base 9: mod_base = OTHER; note = Uracil
  modified_base 11: mod_base = OTHER; note = Uracil
gtaagttctgtccaagcc

SEQ ID NO: 14087 - DNA, 18 bp, synthetic construct
  misc_feature 1..18: note = Description of Artificial Sequence: Synthetic Antisense oligonucleotide
  misc_feature 1..18: note = Original Sequence: gtaaguucuguccaagcc
  modified_base 1..2: mod_base = OTHER; note = bicyclic nucleic acid (BNA)
  modified_base 8: mod_base = OTHER; note = bicyclic nucleic acid (BNA)
  modified_base 10: mod_base = OTHER; note = bicyclic nucleic acid (BNA)
  modified_base 8: mod_base = OTHER; note = 5-methyl
  modified_base 12..13: mod_base = OTHER; note = 5-methyl
  modified_base 17..18: mod_base = OTHER; note = 5-methyl
  source 1..18: mol_type = other DNA
  modified_base 6: mod_base = OTHER; note = Uracil
  modified_base 7: mod_base = OTHER; note = Uracil
  modified_base 9: mod_base = OTHER; note = Uracil
  modified_base 11: mod_base = OTHER; note = Uracil
gtaagttctgtccaagcc

SEQ ID NO: 14088 - DNA, 18 bp, synthetic construct
  misc_feature 1..18: note = Description of Artificial Sequence: Synthetic Antisense oligonucleotide
  misc_feature 1..18: note = Original Sequence: gtaaguucuguccaagcc
  modified_base 1..2: mod_base = OTHER; note = bicyclic nucleic acid (BNA)
  modified_base 13: mod_base = OTHER; note = bicyclic nucleic acid (BNA)
  modified_base 16: mod_base = OTHER; note = bicyclic nucleic acid (BNA)
  modified_base 8: mod_base = OTHER; note = 5-methyl
  modified_base 12..13: mod_base = OTHER; note = 5-methyl
  modified_base 17..18: mod_base = OTHER; note = 5-methyl
  source 1..18: mol_type = other DNA
  modified_base 6: mod_base = OTHER; note = Uracil
  modified_base 7: mod_base = OTHER; note = Uracil
  modified_base 9: mod_base = OTHER; note = Uracil
  modified_base 11: mod_base = OTHER; note = Uracil
gtaagttctgtccaagcc

SEQ ID NO: 14089 - DNA, 18 bp, synthetic construct
  misc_feature 1..18: note = Description of Artificial Sequence: Synthetic Antisense oligonucleotide
  misc_feature 1..18: note = Original Sequence: gtaaguucuguccaagcc
  modified_base 1..2: mod_base = OTHER; note = bicyclic nucleic acid (BNA)
  modified_base 5: mod_base = OTHER; note = bicyclic nucleic acid (BNA)
  modified_base 16: mod_base = OTHER; note = bicyclic nucleic acid (BNA)
  modified_base 8: mod_base = OTHER; note = 5-methyl
  modified_base 12..13: mod_base = OTHER; note = 5-methyl
  modified_base 17..18: mod_base = OTHER; note = 5-methyl
  source 1..18: mol_type = other DNA
  modified_base 6: mod_base = OTHER; note = Uracil
  modified_base 7: mod_base = OTHER; note = Uracil
  modified_base 9: mod_base = OTHER; note = Uracil
  modified_base 11: mod_base = OTHER; note = Uracil
gtaagttctgtccaagcc

SEQ ID NO: 14090 - DNA, 18 bp, synthetic construct
  misc_feature 1..18: note = Description of Artificial Sequence: Synthetic Antisense oligonucleotide
  misc_feature 1..18: note = Original Sequence: gtaaguucuguccaagcc
  modified_base 1..2: mod_base = OTHER; note = bicyclic nucleic acid (BNA)
  modified_base 12: mod_base = OTHER; note = bicyclic nucleic acid (BNA)
  modified_base 16: mod_base = OTHER; note = bicyclic nucleic acid (BNA)
  modified_base 8: mod_base = OTHER; note = 5-methyl
  modified_base 12..13: mod_base = OTHER; note = 5-methyl
  modified_base 17..18: mod_base = OTHER; note = 5-methyl
  source 1..18: mol_type = other DNA
  modified_base 6: mod_base = OTHER; note = Uracil
  modified_base 7: mod_base = OTHER; note = Uracil
  modified_base 9: mod_base = OTHER; note = Uracil
  modified_base 11: mod_base = OTHER; note = Uracil
gtaagttctgtccaagcc

SEQ ID NO: 14091 - DNA, 18 bp, synthetic construct
  misc_feature 1..18: note = Description of Artificial Sequence: Synthetic Antisense oligonucleotide
  misc_feature 1..18: note = Original Sequence: gtaaguucuguccaagcc
  modified_base 1..2: mod_base = OTHER; note = bicyclic nucleic acid (BNA)
  modified_base 16..17: mod_base = OTHER; note = bicyclic nucleic acid (BNA)
  modified_base 8: mod_base = OTHER; note = 5-methyl
  modified_base 12..13: mod_base = OTHER; note = 5-methyl
  modified_base 17..18: mod_base = OTHER; note = 5-methyl
  source 1..18: mol_type = other DNA
  modified_base 6: mod_base = OTHER; note = Uracil
  modified_base 7: mod_base = OTHER; note = Uracil
  modified_base 9: mod_base = OTHER; note = Uracil
  modified_base 11: mod_base = OTHER; note = Uracil
gtaagttctgtccaagcc

SEQ ID NO: 14092 - DNA, 18 bp, synthetic construct
  misc_feature 1..18: note = Description of Artificial Sequence: Synthetic Antisense oligonucleotide
  misc_feature 1..18: note = Original Sequence: gtaaguucuguccaagcc
  modified_base 1..2: mod_base = OTHER; note = bicyclic nucleic acid (BNA)
  modified_base 10: mod_base = OTHER; note = bicyclic nucleic acid (BNA)
  modified_base 13: mod_base = OTHER; note = bicyclic nucleic acid (BNA)
  modified_base 8: mod_base = OTHER; note = 5-methyl
  modified_base 12..13: mod_base = OTHER; note = 5-methyl
  modified_base 17..18: mod_base = OTHER; note = 5-methyl
  source 1..18: mol_type = other DNA
  modified_base 6: mod_base = OTHER; note = Uracil
  modified_base 7: mod_base = OTHER; note = Uracil
  modified_base 9: mod_base = OTHER; note = Uracil
  modified_base 11: mod_base = OTHER; note = Uracil
gtaagttctgtccaagcc

SEQ ID NO: 14093 - RNA, 18 nt, synthetic construct
  misc_feature 1..18: note = Description of Artificial Sequence: Synthetic Antisense oligonucleotide
  modified_base 1..2: mod_base = OTHER; note = bicyclic nucleic acid (BNA)
  modified_base 6: mod_base = OTHER; note = bicyclic nucleic acid (BNA)
  modified_base 10: mod_base = OTHER; note = bicyclic nucleic acid (BNA)
  modified_base 4: mod_base = OTHER; note = 5-methyl
  modified_base 13: mod_base = OTHER; note = 5-methyl
  modified_base 17..18: mod_base = OTHER; note = 5-methyl
  source 1..18: mol_type = other RNA
agtcggtaagttctgtcc

SEQ ID NO: 14094 - RNA, 18 nt, synthetic construct
  misc_feature 1..18: note = Description of Artificial Sequence: Synthetic Antisense oligonucleotide
  modified_base 1..2: mod_base = OTHER; note = bicyclic nucleic acid (BNA)
  modified_base 5: mod_base = OTHER; note = bicyclic nucleic acid (BNA)
  modified_base 13: mod_base = OTHER; note = bicyclic nucleic acid (BNA)
  modified_base 4: mod_base = OTHER; note = 5-methyl
  modified_base 13: mod_base = OTHER; note = 5-methyl
  modified_base 17..18: mod_base = OTHER; note = 5-methyl
  source 1..18: mol_type = other RNA
agtcggtaagttctgtcc

SEQ ID NO: 14095 - RNA, 18 nt, synthetic construct
  misc_feature 1..18: note = Description of Artificial Sequence: Synthetic Antisense oligonucleotide
  modified_base 1..2: mod_base = OTHER; note = bicyclic nucleic acid (BNA)
  modified_base 13: mod_base = OTHER; note = bicyclic nucleic acid (BNA)
  modified_base 17: mod_base = OTHER; note = bicyclic nucleic acid (BNA)
  modified_base 4: mod_base = OTHER; note = 5-methyl
  modified_base 13: mod_base = OTHER; note = 5-methyl
  modified_base 17..18: mod_base = OTHER; note = 5-methyl
  source 1..18: mol_type = other RNA
agtcggtaagttctgtcc

SEQ ID NO: 14096 - RNA, 18 nt, synthetic construct
  misc_feature 1..18: note = Description of Artificial Sequence: Synthetic Antisense oligonucleotide
  modified_base 1..2: mod_base = OTHER; note = bicyclic nucleic acid (BNA)
  modified_base 4: mod_base = OTHER; note = bicyclic nucleic acid (BNA)
  modified_base 15: mod_base = OTHER; note = bicyclic nucleic acid (BNA)
  modified_base 4: mod_base = OTHER; note = 5-methyl
  modified_base 13: mod_base = OTHER; note = 5-methyl
  modified_base 17..18: mod_base = OTHER; note = 5-methyl
  source 1..18: mol_type = other RNA
agtcggtaagttctgtcc

SEQ ID NO: 14097 - RNA, 18 nt, synthetic construct
  misc_feature 1..18: note = Description of Artificial Sequence: Synthetic Antisense oligonucleotide
  modified_base 1..2: mod_base = OTHER; note = bicyclic nucleic acid (BNA)
  modified_base 5: mod_base = OTHER; note = bicyclic nucleic acid (BNA)
  modified_base 10: mod_base = OTHER; note = bicyclic nucleic acid (BNA)
  modified_base 4: mod_base = OTHER; note = 5-methyl
  modified_base 13: mod_base = OTHER; note = 5-methyl
  modified_base 17..18: mod_base = OTHER; note = 5-methyl
  source 1..18: mol_type = other RNA
agtcggtaagttctgtcc

SEQ ID NO: 14098 - RNA, 18 nt, synthetic construct
  misc_feature 1..18: note = Description of Artificial Sequence: Synthetic Antisense oligonucleotide
  modified_base 1..2: mod_base = OTHER; note = bicyclic nucleic acid (BNA)
  modified_base 6: mod_base = OTHER; note = bicyclic nucleic acid (BNA)
  modified_base 13: mod_base = OTHER; note = bicyclic nucleic acid (BNA)
  modified_base 4: mod_base = OTHER; note = 5-methyl
  modified_base 13: mod_base = OTHER; note = 5-methyl
  modified_base 17..18: mod_base = OTHER; note = 5-methyl
  source 1..18: mol_type = other RNA
agtcggtaagttctgtcc

SEQ ID NO: 14099 - RNA, 18 nt, synthetic construct
  misc_feature 1..18: note = Description of Artificial Sequence: Synthetic Antisense oligonucleotide
  modified_base 1..2: mod_base = OTHER; note = bicyclic nucleic acid (BNA)
  modified_base 4: mod_base = OTHER; note = bicyclic nucleic acid (BNA)
  modified_base 17: mod_base = OTHER; note = bicyclic nucleic acid (BNA)
  modified_base 4: mod_base = OTHER; note = 5-methyl
  modified_base 13: mod_base = OTHER; note = 5-methyl
  modified_base 17..18: mod_base = OTHER; note = 5-methyl
  source 1..18: mol_type = other RNA
agtcggtaagttctgtcc

SEQ ID NO: 14100 - RNA, 18 nt, synthetic construct
  misc_feature 1..18: note = Description of Artificial Sequence: Synthetic Antisense oligonucleotide
  modified_base 1..2: mod_base = OTHER; note = bicyclic nucleic acid (BNA)
  modified_base 10: mod_base = OTHER; note = bicyclic nucleic acid (BNA)
  modified_base 15: mod_base = OTHER; note = bicyclic nucleic acid (BNA)
  modified_base 4: mod_base = OTHER; note = 5-methyl
  modified_base 13: mod_base = OTHER; note = 5-methyl
  modified_base 17..18: mod_base = OTHER; note = 5-methyl
  source 1..18: mol_type = other RNA
agtcggtaagttctgtcc

SEQ ID NO: 14101 - RNA, 18 nt, synthetic construct
  misc_feature 1..18: note = Description of Artificial Sequence: Synthetic Antisense oligonucleotide
  modified_base 1..2: mod_base = OTHER; note = bicyclic nucleic acid (BNA)
  modified_base 13: mod_base = OTHER; note = bicyclic nucleic acid (BNA)
  modified_base 15: mod_base = OTHER; note = bicyclic nucleic acid (BNA)
  modified_base 4: mod_base = OTHER; note = 5-methyl
  modified_base 13: mod_base = OTHER; note = 5-methyl
  modified_base 17..18: mod_base = OTHER; note = 5-methyl
  source 1..18: mol_type = other RNA
agtcggtaagttctgtcc

SEQ ID NO: 14102 - RNA, 18 nt, synthetic construct
  misc_feature 1..18: note = Description of Artificial Sequence: Synthetic Antisense oligonucleotide
  modified_base 1..2: mod_base = OTHER; note = bicyclic nucleic acid (BNA)
  modified_base 5..6: mod_base = OTHER; note = bicyclic nucleic acid (BNA)
  modified_base 4: mod_base = OTHER; note = 5-methyl
  modified_base 13: mod_base = OTHER; note = 5-methyl
  modified_base 17..18: mod_base = OTHER; note = 5-methyl
  source 1..18: mol_type = other RNA
agtcggtaagttctgtcc

SEQ ID NO: 14103 - RNA, 18 nt, synthetic construct
  misc_feature 1..18: note = Description of Artificial Sequence: Synthetic Antisense oligonucleotide
  modified_base 1..2: mod_base = OTHER; note = bicyclic nucleic acid (BNA)
  modified_base 5: mod_base = OTHER; note = bicyclic nucleic acid (BNA)
  modified_base 15: mod_base = OTHER; note = bicyclic nucleic acid (BNA)
  modified_base 4: mod_base = OTHER; note = 5-methyl
  modified_base 13: mod_base = OTHER; note = 5-methyl
  modified_base 17..18: mod_base = OTHER; note = 5-methyl
  source 1..18: mol_type = other RNA
agtcggtaagttctgtcc

SEQ ID NO: 14104 - RNA, 18 nt, synthetic construct
  misc_feature 1..18: note = Description of Artificial Sequence: Synthetic Antisense oligonucleotide
  modified_base 1..2: mod_base = OTHER; note = bicyclic nucleic acid (BNA)
  modified_base 5: mod_base = OTHER; note = bicyclic nucleic acid (BNA)
  modified_base 17: mod_base = OTHER; note = bicyclic nucleic acid (BNA)
  modified_base 4: mod_base = OTHER; note = 5-methyl
  modified_base 13: mod_base = OTHER; note = 5-methyl
  modified_base 17..18: mod_base = OTHER; note = 5-methyl
  source 1..18: mol_type = other RNA
agtcggtaagttctgtcc

SEQ ID NO: 14105 - RNA, 18 nt, synthetic construct
  misc_feature 1..18: note = Description of Artificial Sequence: Synthetic Antisense oligonucleotide
  modified_base 1..2: mod_base = OTHER; note = bicyclic nucleic acid (BNA)
  modified_base 10: mod_base = OTHER; note = bicyclic nucleic acid (BNA)
  modified_base 17: mod_base = OTHER; note = bicyclic nucleic acid (BNA)
  modified_base 4: mod_base = OTHER; note = 5-methyl
  modified_base 13: mod_base = OTHER; note = 5-methyl
  modified_base 17..18: mod_base = OTHER; note = 5-methyl
  source 1..18: mol_type = other RNA
agtcggtaagttctgtcc

SEQ ID NO: 14106 - RNA, 18 nt, synthetic construct
  misc_feature 1..18: note = Description of Artificial Sequence: Synthetic Antisense oligonucleotide
  modified_base 1..2: mod_base = OTHER; note = bicyclic nucleic acid (BNA)
  modified_base 4: mod_base = OTHER; note = bicyclic nucleic acid (BNA)
  modified_base 10: mod_base = OTHER; note = bicyclic nucleic acid (BNA)
  modified_base 4: mod_base = OTHER; note = 5-methyl
  modified_base 13: mod_base = OTHER; note = 5-methyl
  modified_base 17..18: mod_base = OTHER; note = 5-methyl
  source 1..18: mol_type = other RNA
agtcggtaagttctgtcc

SEQ ID NO: 14107 - RNA, 18 nt, synthetic construct
  misc_feature 1..18: note = Description of Artificial Sequence: Synthetic Antisense oligonucleotide
  modified_base 1..2: mod_base = OTHER; note = bicyclic nucleic acid (BNA)
  modified_base 4: mod_base = OTHER; note = bicyclic nucleic acid (BNA)
  modified_base 6: mod_base = OTHER; note = bicyclic nucleic acid (BNA)
  modified_base 4: mod_base = OTHER; note = 5-methyl
  modified_base 13: mod_base = OTHER; note = 5-methyl
  modified_base 17..18: mod_base = OTHER; note = 5-methyl
  source 1..18: mol_type = other RNA
agtcggtaagttctgtcc

SEQ ID NO: 14108 - RNA, 18 nt, synthetic construct
  misc_feature 1..18: note = Description of Artificial Sequence: Synthetic Antisense oligonucleotide
  modified_base 1..2: mod_base = OTHER; note = bicyclic nucleic acid (BNA)
  modified_base 4: mod_base = OTHER; note = bicyclic nucleic acid (BNA)
  modified_base 13: mod_base = OTHER; note = bicyclic nucleic acid (BNA)
  modified_base 4: mod_base = OTHER; note = 5-methyl
  modified_base 13: mod_base = OTHER; note = 5-methyl
  modified_base 17..18: mod_base = OTHER; note = 5-methyl
  source 1..18: mol_type = other RNA
agtcggtaagttctgtcc

SEQ ID NO: 14109 - RNA, 18 nt, synthetic construct
  misc_feature 1..18: note = Description of Artificial Sequence: Synthetic Antisense oligonucleotide
  modified_base 1..2: mod_base = OTHER; note = bicyclic nucleic acid (BNA)
  modified_base 15: mod_base = OTHER; note = bicyclic nucleic acid (BNA)
  modified_base 17: mod_base = OTHER; note = bicyclic nucleic acid (BNA)
  modified_base 4: mod_base = OTHER; note = 5-methyl
  modified_base 13: mod_base = OTHER; note = 5-methyl
  modified_base 17..18: mod_base = OTHER; note = 5-methyl
  source 1..18: mol_type = other RNA
agtcggtaagttctgtcc

SEQ ID NO: 14110 - RNA, 18 nt, synthetic construct
  misc_feature 1..18: note = Description of Artificial Sequence: Synthetic Antisense oligonucleotide
  modified_base 1..2: mod_base = OTHER; note = bicyclic nucleic acid (BNA)
  modified_base 6: mod_base = OTHER; note = bicyclic nucleic acid (BNA)
  modified_base 17: mod_base = OTHER; note = bicyclic nucleic acid (BNA)
  modified_base 4: mod_base = OTHER; note = 5-methyl
  modified_base 13: mod_base = OTHER; note = 5-methyl
  modified_base 17..18: mod_base = OTHER; note = 5-methyl
  source 1..18: mol_type = other RNA
agtcggtaagttctgtcc

SEQ ID NO: 14111 - RNA, 18 nt, synthetic construct
  misc_feature 1..18: note = Description of Artificial Sequence: Synthetic Antisense oligonucleotide
  modified_base 1..2: mod_base = OTHER; note = bicyclic nucleic acid (BNA)
  modified_base 6: mod_base = OTHER; note = bicyclic nucleic acid (BNA)
  modified_base 15: mod_base = OTHER; note = bicyclic nucleic acid (BNA)
  modified_base 4: mod_base = OTHER; note = 5-methyl
  modified_base 13: mod_base = OTHER; note = 5-methyl
  modified_base 17..18: mod_base = OTHER; note = 5-methyl
  source 1..18: mol_type = other RNA
agtcggtaagttctgtcc

SEQ ID NO: 14112 - RNA, 18 nt, synthetic construct
  misc_feature 1..18: note = Description of Artificial Sequence: Synthetic Antisense oligonucleotide
  modified_base 1..2: mod_base = OTHER; note = bicyclic nucleic acid (BNA)
  modified_base 4..5: mod_base = OTHER; note = bicyclic nucleic acid (BNA)
  modified_base 4: mod_base = OTHER; note = 5-methyl
  modified_base 13: mod_base = OTHER; note = 5-methyl
  modified_base 17..18: mod_base = OTHER; note = 5-methyl
  source 1..18: mol_type = other RNA
agtcggtaagttctgtcc

SEQ ID NO: 14113 - RNA, 18 nt, synthetic construct
  misc_feature 1..18: note = Description of Artificial Sequence: Synthetic Antisense oligonucleotide
  modified_base 1..2: mod_base = OTHER; note = bicyclic nucleic acid (BNA)
  modified_base 10: mod_base = OTHER; note = bicyclic nucleic acid (BNA)
  modified_base 13: mod_base = OTHER; note = bicyclic nucleic acid (BNA)
  modified_base 4: mod_base = OTHER; note = 5-methyl
  modified_base 13: mod_base = OTHER; note = 5-methyl
  modified_base 17..18: mod_base = OTHER; note = 5-methyl
  source 1..18: mol_type = other RNA
agtcggtaagttctgtcc

SEQ ID NO: 14114 - DNA, 18 bp, synthetic construct
  misc_feature 1..18: note = Description of Artificial Sequence: Synthetic Antisense oligonucleotide
  misc_feature 1..18: note = Original Sequence: ctguccaagcccgguuga
  modified_base 1: mod_base = OTHER; note = 5-methyl
  modified_base 5..6: mod_base = OTHER; note = 5-methyl
  modified_base 10..12: mod_base = OTHER; note = 5-methyl
  modified_base 1..2: mod_base = OTHER; note = bicyclic nucleic acid (BNA)
  modified_base 12: mod_base = OTHER; note = bicyclic nucleic acid (BNA)
  modified_base 17: mod_base = OTHER; note = bicyclic nucleic acid (BNA)
  source 1..18: mol_type = other DNA
  modified_base 4: mod_base = OTHER; note = Uracil
  modified_base 15: mod_base = OTHER; note = Uracil
  modified_base 16: mod_base = OTHER; note = Uracil
ctgtccaagcccggttga

SEQ ID NO: 14115 - DNA, 18 bp, synthetic construct
  misc_feature 1..18: note = Description of Artificial Sequence: Synthetic Antisense oligonucleotide
  misc_feature 1..18: note = Original Sequence: ctguccaagcccgguuga
  modified_base 1: mod_base = OTHER; note = 5-methyl
  modified_base 5..6: mod_base = OTHER; note = 5-methyl
  modified_base 10..12: mod_base = OTHER; note = 5-methyl
  modified_base 1..2: mod_base = OTHER; note = bicyclic nucleic acid (BNA)
  modified_base 6: mod_base = OTHER; note = bicyclic nucleic acid (BNA)
  modified_base 10: mod_base = OTHER; note = bicyclic nucleic acid (BNA)
  source 1..18: mol_type = other DNA
  modified_base 4: mod_base = OTHER; note = Uracil
  modified_base 15: mod_base = OTHER; note = Uracil
  modified_base 16: mod_base = OTHER; note = Uracil
ctgtccaagcccggttga

SEQ ID NO: 14116 - DNA, 18 bp, synthetic construct
  misc_feature 1..18: note = Description of Artificial Sequence: Synthetic Antisense oligonucleotide
  misc_feature 1..18: note = Original Sequence: ctguccaagcccgguuga
  modified_base 1: mod_base = OTHER; note = 5-methyl
  modified_base 5..6: mod_base = OTHER; note = 5-methyl
  modified_base 10..12: mod_base = OTHER; note = 5-methyl
  modified_base 1..2: mod_base = OTHER; note = bicyclic nucleic acid (BNA)
  modified_base 9: mod_base = OTHER; note = bicyclic nucleic acid (BNA)
  modified_base 14: mod_base = OTHER; note = bicyclic nucleic acid (BNA)
  source 1..18: mol_type = other DNA
  modified_base 4: mod_base = OTHER; note = Uracil
  modified_base 15: mod_base = OTHER; note = Uracil
  modified_base 16: mod_base = OTHER; note = Uracil
ctgtccaagcccggttga

SEQ ID NO: 14117 - DNA, 18 bp, synthetic construct
  misc_feature 1..18: note = Description of Artificial Sequence: Synthetic Antisense oligonucleotide
  misc_feature 1..18: note = Original Sequence: ctguccaagcccgguuga
  modified_base 1: mod_base = OTHER; note = 5-methyl
  modified_base 5..6: mod_base = OTHER; note = 5-methyl
  modified_base 10..12: mod_base = OTHER; note = 5-methyl
  modified_base 1..2: mod_base = OTHER; note = bicyclic nucleic acid (BNA)
  modified_base 11..12: mod_base = OTHER; note = bicyclic nucleic acid (BNA)
  source 1..18: mol_type = other DNA
  modified_base 4: mod_base = OTHER; note = Uracil
  modified_base 15: mod_base = OTHER; note = Uracil
  modified_base 16: mod_base = OTHER; note = Uracil
ctgtccaagcccggttga

SEQ ID NO: 14118 - DNA, 18 bp, synthetic construct
  misc_feature 1..18: note = Description of Artificial Sequence: Synthetic Antisense oligonucleotide
  misc_feature 1..18: note = Original Sequence: ctguccaagcccgguuga
  modified_base 1: mod_base = OTHER; note = 5-methyl
  modified_base 5..6: mod_base = OTHER; note = 5-methyl
  modified_base 10..12: mod_base = OTHER; note = 5-methyl
  modified_base 1..2: mod_base = OTHER; note = bicyclic nucleic acid (BNA)
  modified_base 5: mod_base = OTHER; note = bicyclic nucleic acid (BNA)
  modified_base 9: mod_base = OTHER; note = bicyclic nucleic acid (BNA)
  source 1..18: mol_type = other DNA
  modified_base 4: mod_base = OTHER; note = Uracil
  modified_base 15: mod_base = OTHER; note = Uracil
  modified_base 16: mod_base = OTHER; note = Uracil
ctgtccaagcccggttga

SEQ ID NO: 14119 - DNA, 18 bp, synthetic construct
  misc_feature 1..18: note = Description of Artificial Sequence: Synthetic Antisense oligonucleotide
  misc_feature 1..18: note = Original Sequence: ctguccaagcccgguuga
  modified_base 1: mod_base = OTHER; note = 5-methyl
  modified_base 5..6: mod_base = OTHER; note = 5-methyl
  modified_base 10..12: mod_base = OTHER; note = 5-methyl
  modified_base 1..3: mod_base = OTHER; note = bicyclic nucleic acid (BNA)
  modified_base 9: mod_base = OTHER; note = bicyclic nucleic acid (BNA)
  source 1..18: mol_type = other DNA
  modified_base 4: mod_base = OTHER; note = Uracil
  modified_base 15: mod_base = OTHER; note = Uracil
  modified_base 16: mod_base = OTHER; note = Uracil
ctgtccaagcccggttga

SEQ ID NO: 14120 - DNA, 18 bp, synthetic construct
  misc_feature 1..18: note = Description of Artificial Sequence: Synthetic Antisense oligonucleotide
  misc_feature 1..18: note = Original Sequence: ctguccaagcccgguuga
  modified_base 1: mod_base = OTHER; note = 5-methyl
  modified_base 5..6: mod_base = OTHER; note = 5-methyl
  modified_base 10..12: mod_base = OTHER; note = 5-methyl
  modified_base 1..2: mod_base = OTHER; note = bicyclic nucleic acid (BNA)
  modified_base 6: mod_base = OTHER; note = bicyclic nucleic acid (BNA)
  modified_base 14: mod_base = OTHER; note = bicyclic nucleic acid (BNA)
  source 1..18: mol_type = other DNA
  modified_base 4: mod_base = OTHER; note = Uracil
  modified_base 15: mod_base = OTHER; note = Uracil
  modified_base 16: mod_base = OTHER; note = Uracil
ctgtccaagcccggttga

SEQ ID NO: 14121 - DNA, 18 bp, synthetic construct
  misc_feature 1..18: note = Description of Artificial Sequence: Synthetic Antisense oligonucleotide
  misc_feature 1..18: note = Original Sequence: ctguccaagcccgguuga
  modified_base 1: mod_base = OTHER; note = 5-methyl
  modified_base 5..6: mod_base = OTHER; note = 5-methyl
  modified_base 10..12: mod_base = OTHER; note = 5-methyl
  modified_base 1..2: mod_base = OTHER; note = bicyclic nucleic acid (BNA)
  modified_base 9..10: mod_base = OTHER; note = bicyclic nucleic acid (BNA)
  source 1..18: mol_type = other DNA
  modified_base 4: mod_base = OTHER; note = Uracil
  modified_base 15: mod_base = OTHER; note = Uracil
  modified_base 16: mod_base = OTHER; note = Uracil
ctgtccaagcccggttga

SEQ ID NO: 14122 - DNA, 18 bp, synthetic construct
  misc_feature 1..18: note = Description of Artificial Sequence: Synthetic Antisense oligonucleotide
  misc_feature 1..18: note = Original Sequence: ctguccaagcccgguuga
  modified_base 1: mod_base = OTHER; note = 5-methyl
  modified_base 5..6: mod_base = OTHER; note = 5-methyl
  modified_base 10..12: mod_base = OTHER; note = 5-methyl
  modified_base 1..2: mod_base = OTHER; note = bicyclic nucleic acid (BNA)
  modified_base 5: mod_base = OTHER; note = bicyclic nucleic acid (BNA)
  modified_base 13: mod_base = OTHER; note = bicyclic nucleic acid (BNA)
  source 1..18: mol_type = other DNA
  modified_base 4: mod_base = OTHER; note = Uracil
  modified_base 15: mod_base = OTHER; note = Uracil
  modified_base 16: mod_base = OTHER; note = Uracil
ctgtccaagcccggttga

SEQ ID NO: 14123 - DNA, 18 bp, synthetic construct
  misc_feature 1..18: note = Description of Artificial Sequence: Synthetic Antisense oligonucleotide
  misc_feature 1..18: note = Original Sequence: ctguccaagcccgguuga
  modified_base 1: mod_base = OTHER; note = 5-methyl
  modified_base 5..6: mod_base = OTHER; note = 5-methyl
  modified_base 10..12: mod_base = OTHER; note = 5-methyl
  modified_base 1..3: mod_base = OTHER; note = bicyclic nucleic acid (BNA)
  modified_base 13: mod_base = OTHER; note = bicyclic nucleic acid (BNA)
  source 1..18: mol_type = other DNA
  modified_base 4: mod_base = OTHER; note = Uracil
  modified_base 15: mod_base = OTHER; note = Uracil
  modified_base 16: mod_base = OTHER; note = Uracil
ctgtccaagcccggttga

SEQ ID NO: 14124 - DNA, 18 bp, synthetic construct
  misc_feature 1..18: note = Description of Artificial Sequence: Synthetic Antisense oligonucleotide
  misc_feature 1..18: note = Original Sequence: ctguccaagcccgguuga
  modified_base 1: mod_base = OTHER; note = 5-methyl
  modified_base 5..6: mod_base = OTHER; note = 5-methyl
  modified_base 10..12: mod_base = OTHER; note = 5-methyl
  modified_base 1..2: mod_base = OTHER; note = bicyclic nucleic acid (BNA)
  modified_base 13: mod_base = OTHER; note = bicyclic nucleic acid (BNA)
  modified_base 17: mod_base = OTHER; note = bicyclic nucleic acid (BNA)
  source 1..18: mol_type = other DNA
  modified_base 4: mod_base = OTHER; note = Uracil
  modified_base 15: mod_base = OTHER; note = Uracil
  modified_base 16: mod_base = OTHER; note = Uracil
ctgtccaagcccggttga

SEQ ID NO: 14125 - DNA, 18 bp, synthetic construct
  misc_feature 1..18: note = Description of Artificial Sequence: Synthetic Antisense oligonucleotide
  misc_feature 1..18: note = Original Sequence: ctguccaagcccgguuga
  modified_base 1: mod_base = OTHER; note = 5-methyl
  modified_base 5..6: mod_base = OTHER; note = 5-methyl
  modified_base 10..12: mod_base = OTHER; note = 5-methyl
  modified_base 1..3: mod_base = OTHER; note = bicyclic nucleic acid (BNA)
  modified_base 6: mod_base = OTHER; note = bicyclic nucleic acid (BNA)
  source 1..18: mol_type = other DNA
  modified_base 4: mod_base = OTHER; note = Uracil
  modified_base 15: mod_base = OTHER; note = Uracil
  modified_base 16: mod_base = OTHER; note = Uracil
ctgtccaagcccggttga

SEQ ID NO: 14126 - DNA, 18 bp, synthetic construct
  misc_feature 1..18: note = Description of Artificial Sequence: Synthetic Antisense oligonucleotide
  misc_feature 1..18: note = Original Sequence: ctguccaagcccgguuga
  modified_base 1: mod_base = OTHER; note = 5-methyl
  modified_base 5..6: mod_base = OTHER; note = 5-methyl
  modified_base 10..12: mod_base = OTHER; note = 5-methyl
  modified_base 1..2: mod_base = OTHER; note = bicyclic nucleic acid (BNA)
  modified_base 6: mod_base = OTHER; note = bicyclic nucleic acid (BNA)
  modified_base 9: mod_base = OTHER; note = bicyclic nucleic acid (BNA)
  source 1..18: mol_type = other DNA
  modified_base 4: mod_base = OTHER; note = Uracil
  modified_base 15: mod_base = OTHER; note = Uracil
  modified_base 16: mod_base = OTHER; note = Uracil
ctgtccaagcccggttga

SEQ ID NO: 14127 - DNA, 18 bp, synthetic construct
  misc_feature 1..18: note = Description of Artificial Sequence: Synthetic Antisense oligonucleotide
  misc_feature 1..18: note = Original Sequence: ctguccaagcccgguuga
  modified_base 1: mod_base = OTHER; note = 5-methyl
  modified_base 5..6: mod_base = OTHER; note = 5-methyl
  modified_base 10..12: mod_base = OTHER; note = 5-methyl
  modified_base 1..2: mod_base = OTHER; note = bicyclic nucleic acid (BNA)
  modified_base 5: mod_base = OTHER; note = bicyclic nucleic acid (BNA)
  modified_base 10: mod_base = OTHER; note = bicyclic nucleic acid (BNA)
  source 1..18: mol_type = other DNA
  modified_base 4: mod_base = OTHER; note = Uracil
  modified_base 15: mod_base = OTHER; note = Uracil
  modified_base 16: mod_base = OTHER; note = Uracil
ctgtccaagcccggttga

SEQ ID NO: 14128 - DNA, 18 bp, synthetic construct
  misc_feature 1..18: note = Description of Artificial Sequence: Synthetic Antisense oligonucleotide
  misc_feature 1..18: note = Original Sequence: ctguccaagcccgguuga
  modified_base 1: mod_base = OTHER; note = 5-methyl
  modified_base 5..6: mod_base = OTHER; note = 5-methyl
  modified_base 10..12: mod_base = OTHER; note = 5-methyl
  modified_base 1..3: mod_base = OTHER; note = bicyclic nucleic acid (BNA)
  modified_base 10: mod_base = OTHER; note = bicyclic nucleic acid (BNA)
  source 1..18: mol_type = other DNA
  modified_base 4: mod_base = OTHER; note = Uracil
  modified_base 15: mod_base = OTHER; note = Uracil
  modified_base 16: mod_base = OTHER; note = Uracil
ctgtccaagcccggttga

SEQ ID NO: 14129 - DNA, 18 bp, synthetic construct
  misc_feature 1..18: note = Description of Artificial Sequence: Synthetic Antisense oligonucleotide
  misc_feature 1..18: note = Original Sequence: ctguccaagcccgguuga
  modified_base 1: mod_base = OTHER; note = 5-methyl
  modified_base 5..6: mod_base = OTHER; note = 5-methyl
  modified_base 10..12: mod_base = OTHER; note = 5-methyl
  modified_base 1..2: mod_base = OTHER; note = bicyclic nucleic acid (BNA)
  modified_base 13..14: mod_base = OTHER; note = bicyclic nucleic acid (BNA)
  source 1..18: mol_type = other DNA
  modified_base 4: mod_base = OTHER; note = Uracil
  modified_base 15: mod_base = OTHER; note = Uracil
  modified_base 16: mod_base = OTHER; note = Uracil
ctgtccaagcccggttga

SEQ ID NO: 14130 - DNA, 18 bp, synthetic construct
  misc_feature 1..18: note = Description of Artificial Sequence: Synthetic Antisense oligonucleotide
  misc_feature 1..18: note = Original Sequence: ctguccaagcccgguuga
  modified_base 1: mod_base = OTHER; note = 5-methyl
  modified_base 5..6: mod_base = OTHER; note = 5-methyl
  modified_base 10..12: mod_base = OTHER; note = 5-methyl
  modified_base 1..2: mod_base = OTHER; note = bicyclic nucleic acid (BNA)
  modified_base 6: mod_base = OTHER; note = bicyclic nucleic acid (BNA)
  modified_base 13: mod_base = OTHER; note = bicyclic nucleic acid (BNA)
  source 1..18: mol_type = other DNA
  modified_base 4: mod_base = OTHER; note = Uracil
  modified_base 15: mod_base = OTHER; note = Uracil
  modified_base 16: mod_base = OTHER; note = Uracil
ctgtccaagcccggttga

SEQ ID NO: 14131 - DNA, 18 bp, synthetic construct
  misc_feature 1..18: note = Description of Artificial Sequence: Synthetic Antisense oligonucleotide
  misc_feature 1..18: note = Original Sequence: ctguccaagcccgguuga
  modified_base 1: mod_base = OTHER; note = 5-methyl
  modified_base 5..6: mod_base = OTHER; note = 5-methyl
  modified_base 10..12: mod_base = OTHER; note = 5-methyl
  modified_base 1..2: mod_base = OTHER; note = bicyclic nucleic acid (BNA)
  modified_base 9: mod_base = OTHER; note = bicyclic nucleic acid (BNA)
  modified_base 11: mod_base = OTHER; note = bicyclic nucleic acid (BNA)
  source 1..18: mol_type = other DNA
  modified_base 4: mod_base = OTHER; note = Uracil
  modified_base 15: mod_base = OTHER; note = Uracil
  modified_base 16: mod_base = OTHER; note = Uracil
ctgtccaagcccggttga

SEQ ID NO: 14132 - DNA, 18 bp, synthetic construct
  misc_feature 1..18: note = Description of Artificial Sequence: Synthetic Antisense oligonucleotide
  misc_feature 1..18: note = Original Sequence: ctguccaagcccgguuga
  modified_base 1: mod_base = OTHER; note = 5-methyl
  modified_base 5..6: mod_base = OTHER; note = 5-methyl
  modified_base 10..12: mod_base = OTHER; note = 5-methyl
  modified_base 1..2: mod_base = OTHER; note = bicyclic nucleic acid (BNA)
  modified_base 14: mod_base = OTHER; note = bicyclic nucleic acid (BNA)
  modified_base 17: mod_base = OTHER; note = bicyclic nucleic acid (BNA)
  source 1..18: mol_type = other DNA
  modified_base 4: mod_base = OTHER; note = Uracil
  modified_base 15: mod_base = OTHER; note = Uracil
  modified_base 16: mod_base = OTHER; note = Uracil
ctgtccaagcccggttga

SEQ ID NO: 14133 - DNA, 18 bp, synthetic construct
  misc_feature 1..18: note = Description of Artificial Sequence: Synthetic Antisense oligonucleotide
  misc_feature 1..18: note = Original Sequence: ctguccaagcccgguuga
  modified_base 1: mod_base = OTHER; note = 5-methyl
  modified_base 5..6: mod_base = OTHER; note = 5-methyl
  modified_base 10..12: mod_base = OTHER; note = 5-methyl
  modified_base 1..2: mod_base = OTHER; note = bicyclic nucleic acid (BNA)
  modified_base 11: mod_base = OTHER; note = bicyclic nucleic acid (BNA)
  modified_base 13: mod_base = OTHER; note = bicyclic nucleic acid (BNA)
  source 1..18: mol_type = other DNA
  modified_base 4: mod_base = OTHER; note = Uracil
  modified_base 15: mod_base = OTHER; note = Uracil
  modified_base 16: mod_base = OTHER; note = Uracil
ctgtccaagcccggttga

SEQ ID NO: 14134 - DNA, 18 bp, synthetic construct
  misc_feature 1..18: note = Description of Artificial Sequence: Synthetic Antisense oligonucleotide
  misc_feature 1..18: note = Original Sequence: ctguccaagcccgguuga
  modified_base 1: mod_base = OTHER; note = 5-methyl
  modified_base 5..6: mod_base = OTHER; note = 5-methyl
  modified_base 10..12: mod_base = OTHER; note = 5-methyl
  modified_base 1..2: mod_base = OTHER; note = bicyclic nucleic acid (BNA)
  modified_base 5: mod_base = OTHER; note = bicyclic nucleic acid (BNA)
  modified_base 14: mod_base = OTHER; note = bicyclic nucleic acid (BNA)
  source 1..18: mol_type = other DNA
  modified_base 4: mod_base = OTHER; note = Uracil
  modified_base 15: mod_base = OTHER; note = Uracil
  modified_base 16: mod_base = OTHER; note = Uracil
ctgtccaagcccggttga

SEQ ID NO: 14135 - DNA, 18 bp, synthetic construct
  misc_feature 1..18: note = Description of Artificial Sequence: Synthetic Antisense oligonucleotide
  misc_feature 1..18: note = Original Sequence: ctguccaagcccgguuga
  modified_base 1: mod_base = OTHER; note = 5-methyl
  modified_base 5..6: mod_base = OTHER; note = 5-methyl
  modified_base 10..12: mod_base = OTHER; note = 5-methyl
  modified_base 1..3: mod_base = OTHER; note = bicyclic nucleic acid (BNA)
  modified_base 14: mod_base = OTHER; note = bicyclic nucleic acid (BNA)
  source 1..18: mol_type = other DNA
  modified_base 4: mod_base = OTHER; note = Uracil
  modified_base 15: mod_base = OTHER; note = Uracil
  modified_base 16: mod_base = OTHER; note = Uracil
ctgtccaagcccggttga

SEQ ID NO: 14136 - DNA, 18 bp, synthetic construct
  misc_feature 1..18: note = Description of Artificial Sequence: Synthetic Antisense oligonucleotide
  misc_feature 1..18: note = Original Sequence: ctguccaagcccgguuga
  modified_base 1: mod_base = OTHER; note = 5-methyl
  modified_base 5..6: mod_base = OTHER; note = 5-methyl
  modified_base 10..12: mod_base = OTHER; note = 5-methyl
  modified_base 1..2: mod_base = OTHER; note = bicyclic nucleic acid (BNA)
  modified_base 10: mod_base = OTHER; note = bicyclic nucleic acid (BNA)
  modified_base 12: mod_base = OTHER; note = bicyclic nucleic acid (BNA)
  source 1..18: mol_type = other DNA
  modified_base 4: mod_base = OTHER; note = Uracil
  modified_base 15: mod_base = OTHER; note = Uracil
  modified_base 16: mod_base = OTHER; note = Uracil
ctgtccaagcccggttga

SEQ ID NO: 14137 - DNA, 18 bp, synthetic construct
  misc_feature 1..18: note = Description of Artificial Sequence: Synthetic Antisense oligonucleotide
  misc_feature 1..18: note = Original Sequence: ctguccaagcccgguuga
  modified_base 1: mod_base = OTHER; note = 5-methyl
  modified_base 5..6: mod_base = OTHER; note = 5-methyl
  modified_base 10..12: mod_base = OTHER; note = 5-methyl
  modified_base 1..2: mod_base = OTHER; note = bicyclic nucleic acid (BNA)
  modified_base 9: mod_base = OTHER; note = bicyclic nucleic acid (BNA)
  modified_base 17: mod_base = OTHER; note = bicyclic nucleic acid (BNA)
  source 1..18: mol_type = other DNA
  modified_base 4: mod_base = OTHER; note = Uracil
  modified_base 15: mod_base = OTHER; note = Uracil
  modified_base 16: mod_base = OTHER; note = Uracil
ctgtccaagcccggttga

SEQ ID NO: 14138 - DNA, 18 bp, synthetic construct
  misc_feature 1..18: note = Description of Artificial Sequence: Synthetic Antisense oligonucleotide
  misc_feature 1..18: note = Original Sequence: ctguccaagcccgguuga
  modified_base 1: mod_base = OTHER; note = 5-methyl
  modified_base 5..6: mod_base = OTHER; note = 5-methyl
  modified_base 10..12: mod_base = OTHER; note = 5-methyl
  modified_base 1..2: mod_base = OTHER; note = bicyclic nucleic acid (BNA)
  modified_base 12: mod_base = OTHER; note = bicyclic nucleic acid (BNA)
  modified_base 14: mod_base = OTHER; note = bicyclic nucleic acid (BNA)
  source 1..18: mol_type = other DNA
  modified_base 4: mod_base = OTHER; note = Uracil
  modified_base 15: mod_base = OTHER; note = Uracil
  modified_base 16: mod_base = OTHER; note = Uracil
ctgtccaagcccggttga

SEQ ID NO: 14139 - DNA, 18 bp, synthetic construct
  misc_feature 1..18: note = Description of Artificial Sequence: Synthetic Antisense oligonucleotide
  misc_feature 1..18: note = Original Sequence: ctguccaagcccgguuga
  modified_base 1: mod_base = OTHER; note = 5-methyl
  modified_base 5..6: mod_base = OTHER; note = 5-methyl
  modified_base 10..12: mod_base = OTHER; note = 5-methyl
  modified_base 1..2: mod_base = OTHER; note = bicyclic nucleic acid (BNA)
  modified_base 5: mod_base = OTHER; note = bicyclic nucleic acid (BNA)
  modified_base 11: mod_base = OTHER; note = bicyclic nucleic acid (BNA)
  source 1..18: mol_type = other DNA
  modified_base 4: mod_base = OTHER; note = Uracil
  modified_base 15: mod_base = OTHER; note = Uracil
  modified_base 16: mod_base = OTHER; note = Uracil
ctgtccaagcccggttga

SEQ ID NO: 14140 - DNA, 18 bp, synthetic construct
  misc_feature 1..18: note = Description of Artificial Sequence: Synthetic Antisense oligonucleotide
  misc_feature 1..18: note = Original Sequence: ctguccaagcccgguuga
  modified_base 1: mod_base = OTHER; note = 5-methyl
  modified_base 5..6: mod_base = OTHER; note = 5-methyl
  modified_base 10..12: mod_base = OTHER; note = 5-methyl
  modified_base 1..3: mod_base = OTHER; note = bicyclic nucleic acid (BNA)
  modified_base 17: mod_base = OTHER; note = bicyclic nucleic acid (BNA)
  source 1..18: mol_type = other DNA
  modified_base 4: mod_base = OTHER; note = Uracil
  modified_base 15: mod_base = OTHER; note = Uracil
  modified_base 16: mod_base = OTHER; note = Uracil
ctgtccaagcccggttga

SEQ ID NO: 14141 - DNA, 18 bp, synthetic construct
  misc_feature 1..18: note = Description of Artificial Sequence: Synthetic Antisense oligonucleotide
  misc_feature 1..18: note = Original Sequence: ctguccaagcccgguuga
  modified_base 1: mod_base = OTHER; note = 5-methyl
  modified_base 5..6: mod_base = OTHER; note = 5-methyl
  modified_base 10..12: mod_base = OTHER; note = 5-methyl
  modified_base 1..2: mod_base = OTHER; note = bicyclic nucleic acid (BNA)
  modified_base 6: mod_base = OTHER; note = bicyclic nucleic acid (BNA)
  modified_base 12: mod_base = OTHER; note = bicyclic nucleic acid (BNA)
  source 1..18: mol_type = other DNA
  modified_base 4: mod_base = OTHER; note = Uracil
  modified_base 15: mod_base = OTHER; note = Uracil
  modified_base 16: mod_base = OTHER; note = Uracil
ctgtccaagcccggttga

SEQ ID NO: 14142 - DNA, 18 bp, synthetic construct
  misc_feature 1..18: note = Description of Artificial Sequence: Synthetic Antisense oligonucleotide
  misc_feature 1..18: note = Original Sequence: ctguccaagcccgguuga
  modified_base 1: mod_base = OTHER; note = 5-methyl
  modified_base 5..6: mod_base = OTHER; note = 5-methyl
  modified_base 10..12: mod_base = OTHER; note = 5-methyl
  modified_base 1..2: mod_base = OTHER; note = bicyclic nucleic acid (BNA)
  modified_base 5..6: mod_base = OTHER; note = bicyclic nucleic acid (BNA)
  source 1..18: mol_type = other DNA
  modified_base 4: mod_base = OTHER; note = Uracil
  modified_base 15: mod_base = OTHER; note = Uracil
  modified_base 16: mod_base = OTHER; note = Uracil
ctgtccaagcccggttga

SEQ ID NO: 14143 - DNA, 18 bp, synthetic construct
  misc_feature 1..18: note = Description of Artificial Sequence: Synthetic Antisense oligonucleotide
  misc_feature 1..18: note = Original Sequence: ctguccaagcccgguuga
  modified_base 1: mod_base = OTHER; note = 5-methyl
  modified_base 5..6: mod_base = OTHER; note = 5-methyl
  modified_base 10..12: mod_base = OTHER; note = 5-methyl
  modified_base 1..2: mod_base = OTHER; note = bicyclic nucleic acid (BNA)
  modified_base 11: mod_base = OTHER; note = bicyclic nucleic acid (BNA)
  modified_base 14: mod_base = OTHER; note = bicyclic nucleic acid (BNA)
  source 1..18: mol_type = other DNA
  modified_base 4: mod_base = OTHER; note = Uracil
  modified_base 15: mod_base = OTHER; note = Uracil
  modified_base 16: mod_base = OTHER; note = Uracil
ctgtccaagcccggttga

SEQ ID NO: 14144 - DNA, 18 bp, synthetic construct
  misc_feature 1..18: note = Description of Artificial Sequence: Synthetic Antisense oligonucleotide
  misc_feature 1..18: note = Original Sequence: ctguccaagcccgguuga
  modified_base 1: mod_base = OTHER; note = 5-methyl
  modified_base 5..6: mod_base = OTHER; note = 5-methyl
  modified_base 10..12: mod_base = OTHER; note = 5-methyl
  modified_base 1..2: mod_base = OTHER; note = bicyclic nucleic acid (BNA)
  modified_base 9: mod_base = OTHER; note = bicyclic nucleic acid (BNA)
  modified_base 12: mod_base = OTHER; note = bicyclic nucleic acid (BNA)
  source 1..18: mol_type = other DNA
  modified_base 4: mod_base = OTHER; note = Uracil
  modified_base 15: mod_base = OTHER; note = Uracil
  modified_base 16: mod_base = OTHER; note = Uracil
ctgtccaagcccggttga

SEQ ID NO: 14145 - DNA, 18 bp, synthetic construct
  misc_feature 1..18: note = Description of Artificial Sequence: Synthetic Antisense oligonucleotide
  misc_feature 1..18: note = Original Sequence: ctguccaagcccgguuga
  modified_base 1: mod_base = OTHER; note = 5-methyl
  modified_base 5..6: mod_base = OTHER; note = 5-methyl
  modified_base 10..12: mod_base = OTHER; note = 5-methyl
  modified_base 1..2: mod_base = OTHER; note = bicyclic nucleic acid (BNA)
  modified_base 5: mod_base = OTHER; note = bicyclic nucleic acid (BNA)
  modified_base 17: mod_base = OTHER; note = bicyclic nucleic acid (BNA)
  source 1..18: mol_type = other DNA
  modified_base 4: mod_base = OTHER; note = Uracil
  modified_base 15: mod_base = OTHER; note = Uracil
  modified_base 16: mod_base = OTHER; note = Uracil
ctgtccaagcccggttga

SEQ ID NO: 14146 - DNA, 18 bp, synthetic construct
  misc_feature 1..18: note = Description of Artificial Sequence: Synthetic Antisense oligonucleotide
  misc_feature 1..18: note = Original Sequence: ctguccaagcccgguuga
  modified_base 1: mod_base = OTHER; note = 5-methyl
  modified_base 5..6: mod_base = OTHER; note = 5-methyl
  modified_base 10..12: mod_base = OTHER; note = 5-methyl
  modified_base 1..3: mod_base = OTHER; note = bicyclic nucleic acid (BNA)
  modified_base 11: mod_base = OTHER; note = bicyclic nucleic acid (BNA)
  source 1..18: mol_type = other DNA
  modified_base 4: mod_base = OTHER; note = Uracil
  modified_base 15: mod_base = OTHER; note = Uracil
  modified_base 16: mod_base = OTHER; note = Uracil
ctgtccaagcccggttga

SEQ ID NO: 14147 - DNA, 18 bp, synthetic construct
  misc_feature 1..18: note = Description of Artificial Sequence: Synthetic Antisense oligonucleotide
  misc_feature 1..18: note = Original Sequence: ctguccaagcccgguuga
  modified_base 1: mod_base = OTHER; note = 5-methyl
  modified_base 5..6: mod_base = OTHER; note = 5-methyl
  modified_base 10..12: mod_base = OTHER; note = 5-methyl
  modified_base 1..2: mod_base = OTHER; note = bicyclic nucleic acid (BNA)
  modified_base 10..11: mod_base = OTHER; note = bicyclic nucleic acid (BNA)
  source 1..18: mol_type = other DNA
  modified_base 4: mod_base = OTHER; note = Uracil
  modified_base 15: mod_base = OTHER; note = Uracil
  modified_base 16: mod_base = OTHER; note = Uracil
ctgtccaagcccggttga

SEQ ID NO: 14148 - DNA, 18 bp, synthetic construct
  misc_feature 1..18: note = Description of Artificial Sequence: Synthetic Antisense oligonucleotide
  misc_feature 1..18: note = Original Sequence: ctguccaagcccgguuga
  modified_base 1: mod_base = OTHER; note = 5-methyl
  modified_base 5..6: mod_base = OTHER; note = 5-methyl
  modified_base 10..12: mod_base = OTHER; note = 5-methyl
  modified_base 1..2: mod_base = OTHER; note = bicyclic nucleic acid (BNA)
  modified_base 10: mod_base = OTHER; note = bicyclic nucleic acid (BNA)
  modified_base 17: mod_base = OTHER; note = bicyclic nucleic acid (BNA)
  source 1..18: mol_type = other DNA
  modified_base 4: mod_base = OTHER; note = Uracil
  modified_base 15: mod_base = OTHER; note = Uracil
  modified_base 16: mod_base = OTHER; note = Uracil
ctgtccaagcccggttga

SEQ ID NO: 14149 - DNA, 18 bp, synthetic construct
  misc_feature 1..18: note = Description of Artificial Sequence: Synthetic Antisense oligonucleotide
  misc_feature 1..18: note = Original Sequence: ctguccaagcccgguuga
  modified_base 1: mod_base = OTHER; note = 5-methyl
  modified_base 5..6: mod_base = OTHER; note = 5-methyl
  modified_base 10..12: mod_base = OTHER; note = 5-methyl
  modified_base 1..2: mod_base = OTHER; note = bicyclic nucleic acid (BNA)
  modified_base 12..13: mod_base = OTHER; note = bicyclic nucleic acid (BNA)
  source 1..18: mol_type = other DNA
  modified_base 4: mod_base = OTHER; note = Uracil
  modified_base 15: mod_base = OTHER; note = Uracil
  modified_base 16: mod_base = OTHER; note = Uracil
ctgtccaagcccggttga

SEQ ID NO: 14150 - DNA, 18 bp, synthetic construct
  misc_feature 1..18: note = Description of Artificial Sequence: Synthetic Antisense oligonucleotide
  misc_feature 1..18: note = Original Sequence: ctguccaagcccgguuga
  modified_base 1: mod_base = OTHER; note = 5-methyl
  modified_base 5..6: mod_base = OTHER; note = 5-methyl
  modified_base 10..12: mod_base = OTHER; note = 5-methyl
  modified_base 1..2: mod_base = OTHER; note = bicyclic nucleic acid (BNA)
  modified_base 5: mod_base = OTHER; note = bicyclic nucleic acid (BNA)
  modified_base 12: mod_base = OTHER; note = bicyclic nucleic acid (BNA)
  source 1..18: mol_type = other DNA
  modified_base 4: mod_base = OTHER; note = Uracil
  modified_base 15: mod_base = OTHER; note = Uracil
  modified_base 16: mod_base = OTHER; note = Uracil
ctgtccaagcccggttga

SEQ ID NO: 14151 - DNA, 18 bp, synthetic construct
  misc_feature 1..18: note = Description of Artificial Sequence: Synthetic Antisense oligonucleotide
  misc_feature 1..18: note = Original Sequence: ctguccaagcccgguuga
  modified_base 1: mod_base = OTHER; note = 5-methyl
  modified_base 5..6: mod_base = OTHER; note = 5-methyl
  modified_base 10..12: mod_base = OTHER; note = 5-methyl
  modified_base 1..2: mod_base = OTHER; note = bicyclic nucleic acid (BNA)
  modified_base 10: mod_base = OTHER; note = bicyclic nucleic acid (BNA)
  modified_base 14: mod_base = OTHER; note = bicyclic nucleic acid (BNA)
  source 1..18: mol_type = other DNA
  modified_base 4: mod_base = OTHER; note = Uracil
  modified_base 15: mod_base = OTHER; note = Uracil
  modified_base 16: mod_base = OTHER; note = Uracil
ctgtccaagcccggttga

SEQ ID NO: 14152 - DNA, 18 bp, synthetic construct
  misc_feature 1..18: note = Description of Artificial Sequence: Synthetic Antisense oligonucleotide
  misc_feature 1..18: note = Original Sequence: ctguccaagcccgguuga
  modified_base 1: mod_base = OTHER; note = 5-methyl
  modified_base 5..6: mod_base = OTHER; note = 5-methyl
  modified_base 10..12: mod_base = OTHER; note = 5-methyl
  modified_base 1..2: mod_base = OTHER; note = bicyclic nucleic acid (BNA)
  modified_base 6: mod_base = OTHER; note = bicyclic nucleic acid (BNA)
  modified_base 11: mod_base = OTHER; note = bicyclic nucleic acid (BNA)
  source 1..18: mol_type = other DNA
  modified_base 4: mod_base = OTHER; note = Uracil
  modified_base 15: mod_base = OTHER; note = Uracil
  modified_base 16: mod_base = OTHER; note = Uracil
ctgtccaagcccggttga

SEQ ID NO: 14153 - DNA, 18 bp, synthetic construct
  misc_feature 1..18: note = Description of Artificial Sequence: Synthetic Antisense oligonucleotide
  misc_feature 1..18: note = Original Sequence: ctguccaagcccgguuga
  modified_base 1: mod_base = OTHER; note = 5-methyl
  modified_base 5..6: mod_base = OTHER; note = 5-methyl
  modified_base 10..12: mod_base = OTHER; note = 5-methyl
  modified_base 1..2: mod_base = OTHER; note = bicyclic nucleic acid (BNA)
  modified_base 6: mod_base = OTHER; note = bicyclic nucleic acid (BNA)
  modified_base 17: mod_base = OTHER; note = bicyclic nucleic acid (BNA)
  source 1..18: mol_type = other DNA
  modified_base 4: mod_base = OTHER; note = Uracil
  modified_base 15: mod_base = OTHER; note = Uracil
  modified_base 16: mod_base = OTHER; note = Uracil
ctgtccaagcccggttga

SEQ ID NO: 14154 - DNA, 18 bp, synthetic construct
  misc_feature 1..18: note = Description of Artificial Sequence: Synthetic Antisense oligonucleotide
  misc_feature 1..18: note = Original Sequence: ctguccaagcccgguuga
  modified_base 1: mod_base = OTHER; note = 5-methyl
  modified_base 5..6: mod_base = OTHER; note = 5-methyl
  modified_base 10..12: mod_base = OTHER; note = 5-methyl
  modified_base 1..2: mod_base = OTHER; note = bicyclic nucleic acid (BNA)
  modified_base 9: mod_base = OTHER; note = bicyclic nucleic acid (BNA)
  modified_base 13: mod_base = OTHER; note = bicyclic nucleic acid (BNA)
  source 1..18: mol_type = other DNA
  modified_base 4: mod_base = OTHER; note = Uracil
  modified_base 15: mod_base = OTHER; note = Uracil
  modified_base 16: mod_base = OTHER; note = Uracil
ctgtccaagcccggttga

SEQ ID NO: 14155 - DNA, 18 bp, synthetic construct
  misc_feature 1..18: note = Description of Artificial Sequence: Synthetic Antisense oligonucleotide
  misc_feature 1..18: note = Original Sequence: ctguccaagcccgguuga
  modified_base 1: mod_base = OTHER; note = 5-methyl
  modified_base 5..6: mod_base = OTHER; note = 5-methyl
  modified_base 10..12: mod_base = OTHER; note = 5-methyl
  modified_base 1..2: mod_base = OTHER; note = bicyclic nucleic acid (BNA)
  modified_base 11: mod_base = OTHER; note = bicyclic nucleic acid (BNA)
  modified_base 17: mod_base = OTHER; note = bicyclic nucleic acid (BNA)
  source 1..18: mol_type = other DNA
  modified_base 4: mod_base = OTHER; note = Uracil
  modified_base 15: mod_base = OTHER; note = Uracil
  modified_base 16: mod_base = OTHER; note = Uracil
ctgtccaagcccggttga

SEQ ID NO: 14156 - DNA, 18 bp, synthetic construct
  misc_feature 1..18: note = Description of Artificial Sequence: Synthetic Antisense oligonucleotide
  misc_feature 1..18: note = Original Sequence: ctguccaagcccgguuga
  modified_base 1: mod_base = OTHER; note = 5-methyl
  modified_base 5..6: mod_base = OTHER; note = 5-methyl
  modified_base 10..12: mod_base = OTHER; note = 5-methyl
  modified_base 1..3: mod_base = OTHER; note = bicyclic nucleic acid (BNA)
  modified_base 12: mod_base = OTHER; note = bicyclic nucleic acid (BNA)
  source 1..18: mol_type = other DNA
  modified_base 4: mod_base = OTHER; note = Uracil
  modified_base 15: mod_base = OTHER; note = Uracil
  modified_base 16: mod_base = OTHER; note = Uracil
ctgtccaagcccggttga

SEQ ID NO: 14157 - DNA, 18 bp, synthetic construct
  misc_feature 1..18: note = Description of Artificial Sequence: Synthetic Antisense oligonucleotide
  misc_feature 1..18: note = Original Sequence: ctguccaagcccgguuga
  modified_base 1: mod_base = OTHER; note = 5-methyl
  modified_base 5..6: mod_base = OTHER; note = 5-methyl
  modified_base 10..12: mod_base = OTHER; note = 5-methyl
  modified_base 1..3: mod_base = OTHER; note = bicyclic nucleic acid (BNA)
  modified_base 5: mod_base = OTHER; note = bicyclic nucleic acid (BNA)
  source 1..18: mol_type = other DNA
  modified_base 4: mod_base = OTHER; note = Uracil
  modified_base 15: mod_base = OTHER; note = Uracil
  modified_base 16: mod_base = OTHER; note = Uracil
ctgtccaagcccggttga

SEQ ID NO: 14158 - DNA, 18 bp, synthetic construct
  misc_feature 1..18: note = Description of Artificial Sequence: Synthetic Antisense oligonucleotide
  misc_feature 1..18: note = Original Sequence: ctguccaagcccgguuga
  modified_base 1: mod_base = OTHER; note = 5-methyl
  modified_base 5..6: mod_base = OTHER; note = 5-methyl
  modified_base 10..12: mod_base = OTHER; note = 5-methyl
  modified_base 1..2: mod_base = OTHER; note = bicyclic nucleic acid (BNA)
  modified_base 10: mod_base = OTHER; note = bicyclic nucleic acid (BNA)
  modified_base 13: mod_base = OTHER; note = bicyclic nucleic acid (BNA)
  source 1..18: mol_type = other DNA
  modified_base 4: mod_base = OTHER; note = Uracil
  modified_base 15: mod_base = OTHER; note = Uracil
  modified_base 16: mod_base = OTHER; note = Uracil
ctgtccaagcccggttga

SEQ ID NO: 14159 - DNA, 20 bp, synthetic construct
  misc_feature 1..20: note = Description of Artificial Sequence: Synthetic Antisense oligonucleotide
  misc_feature 1..20: note = Original Sequence: tcaaggaagauggcauuucu
  modified_base 1..2: mod_base = OTHER; note = bicyclic nucleic acid (BNA)
  modified_base 9: mod_base = OTHER; note = bicyclic nucleic acid (BNA)
  modified_base 2: mod_base = OTHER; note = 5-methyl
  modified_base 14: mod_base = OTHER; note = 5-methyl
  modified_base 19: mod_base = OTHER; note = 5-methyl
  source 1..20: mol_type = other DNA
  modified_base 11: mod_base = OTHER; note = Uracil
  modified_base 16: mod_base = OTHER; note = Uracil
  modified_base 17: mod_base = OTHER; note = Uracil
  modified_base 18: mod_base = OTHER; note = Uracil
  modified_base 20: mod_base = OTHER; note = Uracil
tcaaggaagatggcatttct

SEQ ID NO: 14160 - DNA, 20 bp, synthetic construct
  misc_feature 1..20: note = Description of Artificial Sequence: Synthetic Antisense oligonucleotide
  misc_feature 1..20: note = Original Sequence: tcaaggaagauggcauuucu
  modified_base 1..2: mod_base = OTHER; note = bicyclic nucleic acid (BNA)
  modified_base 5: mod_base = OTHER; note = bicyclic nucleic acid (BNA)
  modified_base 2: mod_base = OTHER; note = 5-methyl
  modified_base 14: mod_base = OTHER; note = 5-methyl
  modified_base 19: mod_base = OTHER; note = 5-methyl
  source 1..20: mol_type = other DNA
  modified_base 11: mod_base = OTHER; note = Uracil
  modified_base 16: mod_base = OTHER; note = Uracil
  modified_base 17: mod_base = OTHER; note = Uracil
  modified_base 18: mod_base = OTHER; note = Uracil
  modified_base 20: mod_base = OTHER; note = Uracil
tcaaggaagatggcatttct

SEQ ID NO: 14161 - DNA, 20 bp, synthetic construct
  misc_feature 1..20: note = Description of Artificial Sequence: Synthetic Antisense oligonucleotide
  misc_feature 1..20: note = Original Sequence: tcaaggaagauggcauuucu
  modified_base 1..2: mod_base = OTHER; note = bicyclic nucleic acid (BNA)
  modified_base 6: mod_base = OTHER; note = bicyclic nucleic acid (BNA)
  modified_base 2: mod_base = OTHER; note = 5-methyl
  modified_base 14: mod_base = OTHER; note = 5-methyl
  modified_base 19: mod_base = OTHER; note = 5-methyl
  source 1..20: mol_type = other DNA
  modified_base 11: mod_base = OTHER; note = Uracil
  modified_base 16: mod_base = OTHER; note = Uracil
  modified_base 17: mod_base = OTHER; note = Uracil
  modified_base 18: mod_base = OTHER; note = Uracil
  modified_base 20: mod_base = OTHER; note = Uracil
tcaaggaagatggcatttct

SEQ ID NO: 14162 - DNA, 20 bp, synthetic construct
  misc_feature 1..20: note = Description of Artificial Sequence: Synthetic Antisense oligonucleotide
  misc_feature 1..20: note = Original Sequence: tcaaggaagauggcauuucu
  modified_base 1..2: mod_base = OTHER; note = bicyclic nucleic acid (BNA)
  modified_base 12: mod_base = OTHER; note = bicyclic nucleic acid (BNA)
  modified_base 2: mod_base = OTHER; note = 5-methyl
  modified_base 14: mod_base = OTHER; note = 5-methyl
  modified_base 19: mod_base = OTHER; note = 5-methyl
  source 1..20: mol_type = other DNA
  modified_base 11: mod_base = OTHER; note = Uracil
  modified_base 16: mod_base = OTHER; note = Uracil
  modified_base 17: mod_base = OTHER; note = Uracil
  modified_base 18: mod_base = OTHER; note = Uracil
  modified_base 20: mod_base = OTHER; note = Uracil
tcaaggaagatggcatttct

SEQ ID NO: 14163 - DNA, 20 bp, synthetic construct
  misc_feature 1..20: note = Description of Artificial Sequence: Synthetic Antisense oligonucleotide
  misc_feature 1..20: note = Original Sequence: tcaaggaagauggcauuucu
  modified_base 1..2: mod_base = OTHER; note = bicyclic nucleic acid (BNA)
  modified_base 13: mod_base = OTHER; note = bicyclic nucleic acid (BNA)
  modified_base 2: mod_base = OTHER; note = 5-methyl
  modified_base 14: mod_base = OTHER; note = 5-methyl
  modified_base 19: mod_base = OTHER; note = 5-methyl
  source 1..20: mol_type = other DNA
  modified_base 11: mod_base = OTHER; note = Uracil
  modified_base 16: mod_base = OTHER; note = Uracil
  modified_base 17: mod_base = OTHER; note = Uracil
  modified_base 18: mod_base = OTHER; note = Uracil
  modified_base 20: mod_base = OTHER; note = Uracil
tcaaggaagatggcatttct

SEQ ID NO: 14164 - DNA, 20 bp, synthetic construct
  misc_feature 1..20: note = Description of Artificial Sequence: Synthetic Antisense oligonucleotide
  misc_feature 1..20: note = Original Sequence: tcaaggaagauggcauuucu
  modified_base 1..2: mod_base = OTHER; note = bicyclic nucleic acid (BNA)
  modified_base 19: mod_base = OTHER; note = bicyclic nucleic acid (BNA)
  modified_base 2: mod_base = OTHER; note = 5-methyl
  modified_base 14: mod_base = OTHER; note = 5-methyl
  modified_base 19: mod_base = OTHER; note = 5-methyl
  source 1..20: mol_type = other DNA
  modified_base 11: mod_base = OTHER; note = Uracil
  modified_base 16: mod_base = OTHER; note = Uracil
  modified_base 17: mod_base = OTHER; note = Uracil
  modified_base 18: mod_base = OTHER; note = Uracil
  modified_base 20: mod_base = OTHER; note = Uracil
tcaaggaagatggcatttct

SEQ ID NO: 14165 - DNA, 20 bp, synthetic construct
  misc_feature 1..20: note = Description of Artificial Sequence: Synthetic Antisense oligonucleotide
  misc_feature 1..20: note = Original Sequence: tcaaggaagauggcauuucu
  modified_base 1..2: mod_base = OTHER; note = bicyclic nucleic acid (BNA)
  modified_base 14: mod_base = OTHER; note = bicyclic nucleic acid (BNA)
  modified_base 2: mod_base = OTHER; note = 5-methyl
  modified_base 14: mod_base = OTHER; note = 5-methyl
  modified_base 19: mod_base = OTHER; note = 5-methyl
  source 1..20: mol_type = other DNA
  modified_base 11: mod_base = OTHER; note = Uracil
  modified_base 16: mod_base = OTHER; note = Uracil
  modified_base 17: mod_base = OTHER; note = Uracil
  modified_base 18: mod_base = OTHER; note = Uracil
  modified_base 20: mod_base = OTHER; note = Uracil
tcaaggaagatggcatttct

SEQ ID NO: 14166 - DNA, 22 bp, synthetic construct
  misc_feature 1..22: note = Description of Artificial Sequence: Synthetic Antisense oligonucleotide
  misc_feature 1..22: note = Original Sequence: tcaaggaagauggcauuucuag
  modified_base 1..2: mod_base = OTHER; note = bicyclic nucleic acid (BNA)
  modified_base 9: mod_base = OTHER; note = bicyclic nucleic acid (BNA)
  modified_base 2: mod_base = OTHER; note = 5-methyl
  modified_base 14: mod_base = OTHER; note = 5-methyl
  modified_base 19: mod_base = OTHER; note = 5-methyl
  source 1..22: mol_type = other DNA
  modified_base 11: mod_base = OTHER; note = Uracil
  modified_base 16: mod_base = OTHER; note = Uracil
  modified_base 17: mod_base = OTHER; note = Uracil
  modified_base 18: mod_base = OTHER; note = Uracil
  modified_base 20: mod_base = OTHER; note = Uracil
tcaaggaagatggcatttctag

SEQ ID NO: 14167 - DNA, 22 bp, synthetic construct
  misc_feature 1..22: note = Description of Artificial Sequence: Synthetic Antisense oligonucleotide
  misc_feature 1..22: note = Original Sequence: tcaaggaagauggcauuucuag
  modified_base 1..2: mod_base = OTHER; note = bicyclic nucleic acid (BNA)
  modified_base 5: mod_base = OTHER; note = bicyclic nucleic acid (BNA)
  modified_base 2: mod_base = OTHER; note = 5-methyl
  modified_base 14: mod_base = OTHER; note = 5-methyl
  modified_base 19: mod_base = OTHER; note = 5-methyl
  source 1..22: mol_type = other DNA
  modified_base 11: mod_base = OTHER; note = Uracil
  modified_base 16: mod_base = OTHER; note = Uracil
  modified_base 17: mod_base = OTHER; note = Uracil
  modified_base 18: mod_base = OTHER; note = Uracil
  modified_base 20: mod_base = OTHER; note = Uracil
tcaaggaagatggcatttctag

SEQ ID NO: 14168 - DNA, 22 bp, synthetic construct
  misc_feature 1..22: note = Description of Artificial Sequence: Synthetic Antisense oligonucleotide
  misc_feature 1..22: note = Original Sequence: tcaaggaagauggcauuucuag
  modified_base 1..2: mod_base = OTHER; note = bicyclic nucleic acid (BNA)
  modified_base 6: mod_base = OTHER; note = bicyclic nucleic acid (BNA)
  modified_base 2: mod_base = OTHER; note = 5-methyl
  modified_base 14: mod_base = OTHER; note = 5-methyl
  modified_base 19: mod_base = OTHER; note = 5-methyl
  source 1..22: mol_type = other DNA
  modified_base 11: mod_base = OTHER; note = Uracil
  modified_base 16: mod_base = OTHER; note = Uracil
  modified_base 17: mod_base = OTHER; note = Uracil
  modified_base 18: mod_base = OTHER; note = Uracil
  modified_base 20: mod_base = OTHER; note = Uracil
tcaaggaagatggcatttctag

SEQ ID NO: 14169 - DNA, 22 bp, synthetic construct
  misc_feature 1..22: note = Description of Artificial Sequence: Synthetic Antisense oligonucleotide
  misc_feature 1..22: note = Original Sequence: tcaaggaagauggcauuucuag
  modified_base 1..2: mod_base = OTHER; note = bicyclic nucleic acid (BNA)
  modified_base 12: mod_base = OTHER; note = bicyclic nucleic acid (BNA)
  modified_base 2: mod_base = OTHER; note = 5-methyl
  modified_base 14: mod_base = OTHER; note = 5-methyl
  modified_base 19: mod_base = OTHER; note = 5-methyl
  source 1..22: mol_type = other DNA
  modified_base 11: mod_base = OTHER; note = Uracil
  modified_base 16: mod_base = OTHER; note = Uracil
  modified_base 17: mod_base = OTHER; note = Uracil
  modified_base 18: mod_base = OTHER; note = Uracil
  modified_base 20: mod_base = OTHER; note = Uracil
tcaaggaagatggcatttctag

SEQ ID NO: 14170 - DNA, 22 bp, synthetic construct
  misc_feature 1..22: note = Description of Artificial Sequence: Synthetic Antisense oligonucleotide
  misc_feature 1..22: note = Original Sequence: tcaaggaagauggcauuucuag
  modified_base 1..2: mod_base = OTHER; note = bicyclic nucleic acid (BNA)
  modified_base 13: mod_base = OTHER; note = bicyclic nucleic acid (BNA)
  modified_base 2: mod_base = OTHER; note = 5-methyl
  modified_base 14: mod_base = OTHER; note = 5-methyl
  modified_base 19: mod_base = OTHER; note = 5-methyl
  source 1..22: mol_type = other DNA
  modified_base 11: mod_base = OTHER; note = Uracil
  modified_base 16: mod_base = OTHER; note = Uracil
  modified_base 17: mod_base = OTHER; note = Uracil
  modified_base 18: mod_base = OTHER; note = Uracil
  modified_base 20: mod_base = OTHER; note = Uracil
tcaaggaagatggcatttctag

SEQ ID NO: 14171 - DNA, 22 bp, synthetic construct
  misc_feature 1..22: note = Description of Artificial Sequence: Synthetic Antisense oligonucleotide
  misc_feature 1..22: note = Original Sequence: tcaaggaagauggcauuucuag
  modified_base 1..2: mod_base = OTHER; note = bicyclic nucleic acid (BNA)
  modified_base 19: mod_base = OTHER; note = bicyclic nucleic acid (BNA)
  modified_base 2: mod_base = OTHER; note = 5-methyl
  modified_base 14: mod_base = OTHER; note = 5-methyl
  modified_base 19: mod_base = OTHER; note = 5-methyl
  source 1..22: mol_type = other DNA
  modified_base 11: mod_base = OTHER; note = Uracil
  modified_base 16: mod_base = OTHER; note = Uracil
  modified_base 17: mod_base = OTHER; note = Uracil
  modified_base 18: mod_base = OTHER; note = Uracil
  modified_base 20: mod_base = OTHER; note = Uracil
tcaaggaagatggcatttctag

SEQ ID NO: 14172 - DNA, 22 bp, synthetic construct
  misc_feature 1..22: note = Description of Artificial Sequence: Synthetic Antisense oligonucleotide
  misc_feature 1..22: note = Original Sequence: tcaaggaagauggcauuucuag
  modified_base 1..2: mod_base = OTHER; note = bicyclic nucleic acid (BNA)
  modified_base 14: mod_base = OTHER; note = bicyclic nucleic acid (BNA)
  modified_base 2: mod_base = OTHER; note = 5-methyl
  modified_base 14: mod_base = OTHER; note = 5-methyl
  modified_base 19: mod_base = OTHER; note = 5-methyl
  source 1..22: mol_type = other DNA
  modified_base 11: mod_base = OTHER; note = Uracil
  modified_base 16: mod_base = OTHER; note = Uracil
  modified_base 17: mod_base = OTHER; note = Uracil
  modified_base 18: mod_base = OTHER; note = Uracil
  modified_base 20: mod_base = OTHER; note = Uracil
tcaaggaagatggcatttctag

SEQ ID NO: 14173 - DNA, 20 bp, synthetic construct
  misc_feature 1..20: note = Description of Artificial Sequence: Synthetic Antisense oligonucleotide
  misc_feature 1..20: note = Original Sequence: tcaaggaagauggcauuucu
  modified_base 1..2: mod_base = OTHER; note = bicyclic nucleic acid (BNA)
  modified_base 9: mod_base = OTHER; note = bicyclic nucleic acid (BNA)
  modified_base 14: mod_base = OTHER; note = bicyclic nucleic acid (BNA)
  modified_base 2: mod_base = OTHER; note = 5-methyl
  modified_base 14: mod_base = OTHER; note = 5-methyl
  modified_base 19: mod_base = OTHER; note = 5-methyl
  source 1..20: mol_type = other DNA
  modified_base 11: mod_base = OTHER; note = Uracil
  modified_base 16: mod_base = OTHER; note = Uracil
  modified_base 17: mod_base = OTHER; note = Uracil
  modified_base 18: mod_base = OTHER; note = Uracil
  modified_base 20: mod_base = OTHER; note = Uracil
tcaaggaagatggcatttct

SEQ ID NO: 14174 - DNA, 20 bp, synthetic construct
  misc_feature 1..20: note = Description of Artificial Sequence: Synthetic Antisense oligonucleotide
  misc_feature 1..20: note = Original Sequence: tcaaggaagauggcauuucu
  modified_base 1..2: mod_base = OTHER; note = bicyclic nucleic acid (BNA)
  modified_base 5: mod_base = OTHER; note = bicyclic nucleic acid (BNA)
  modified_base 9: mod_base = OTHER; note = bicyclic nucleic acid (BNA)
  modified_base 2: mod_base = OTHER; note = 5-methyl
  modified_base 14: mod_base = OTHER; note = 5-methyl
  modified_base 19: mod_base = OTHER; note = 5-methyl
  source 1..20: mol_type = other DNA
  modified_base 11: mod_base = OTHER; note = Uracil
  modified_base 16: mod_base = OTHER; note = Uracil
  modified_base 17: mod_base = OTHER; note = Uracil
  modified_base 18: mod_base = OTHER; note = Uracil
  modified_base 20: mod_base = OTHER; note = Uracil
tcaaggaagatggcatttct

SEQ ID NO: 14175 - DNA, 20 bp, synthetic construct
  misc_feature 1..20: note = Description of Artificial Sequence: Synthetic Antisense oligonucleotide
  misc_feature 1..20: note = Original Sequence: tcaaggaagauggcauuucu
  modified_base 1..2: mod_base = OTHER; note = bicyclic nucleic acid (BNA)
  modified_base 5: mod_base = OTHER; note = bicyclic nucleic acid (BNA)
  modified_base 19: mod_base = OTHER; note = bicyclic nucleic acid (BNA)
  modified_base 2: mod_base = OTHER; note = 5-methyl
  modified_base 14: mod_base = OTHER; note = 5-methyl
  modified_base 19: mod_base = OTHER; note = 5-methyl
  source 1..20: mol_type = other DNA
  modified_base 11: mod_base = OTHER; note = Uracil
  modified_base 16: mod_base = OTHER; note = Uracil
  modified_base 17: mod_base = OTHER; note = Uracil
  modified_base 18: mod_base = OTHER; note = Uracil
  modified_base 20: mod_base = OTHER; note = Uracil
tcaaggaagatggcatttct

SEQ ID NO: 14176 - DNA, 20 bp, synthetic construct
  misc_feature 1..20: note = Description of Artificial Sequence: Synthetic Antisense oligonucleotide
  misc_feature 1..20: note = Original Sequence: tcaaggaagauggcauuucu
  modified_base 1..2: mod_base = OTHER; note = bicyclic nucleic acid (BNA)
  modified_base 6: mod_base = OTHER; note = bicyclic nucleic acid (BNA)
  modified_base 14: mod_base = OTHER; note = bicyclic nucleic acid (BNA)
  modified_base 2: mod_base = OTHER; note = 5-methyl
  modified_base 14: mod_base = OTHER; note = 5-methyl
  modified_base 19: mod_base = OTHER; note = 5-methyl
  source 1..20: mol_type = other DNA
  modified_base 11: mod_base = OTHER; note = Uracil
  modified_base 16: mod_base = OTHER; note = Uracil
  modified_base 17: mod_base = OTHER; note = Uracil
  modified_base 18: mod_base = OTHER; note = Uracil
  modified_base 20: mod_base = OTHER; note = Uracil
tcaaggaagatggcatttct

SEQ ID NO: 14177 - DNA, 20 bp, synthetic construct
  misc_feature 1..20: note = Description of Artificial Sequence: Synthetic Antisense oligonucleotide
  misc_feature 1..20: note = Original Sequence: tcaaggaagauggcauuucu
  modified_base 1..2: mod_base = OTHER; note = bicyclic nucleic acid (BNA)
  modified_base 5: mod_base = OTHER; note = bicyclic nucleic acid (BNA)
  modified_base 13: mod_base = OTHER; note = bicyclic nucleic acid (BNA)
  modified_base 2: mod_base = OTHER; note = 5-methyl
  modified_base 14: mod_base = OTHER; note = 5-methyl
  modified_base 19: mod_base = OTHER; note = 5-methyl
  source 1..20: mol_type = other DNA
  modified_base 11: mod_base = OTHER; note = Uracil
  modified_base 16: mod_base = OTHER; note = Uracil
  modified_base 17: mod_base = OTHER; note = Uracil
  modified_base 18: mod_base = OTHER; note = Uracil
  modified_base 20: mod_base = OTHER; note = Uracil
tcaaggaagatggcatttct

SEQ ID NO: 14178 - DNA, 20 bp, synthetic construct
  misc_feature 1..20: note = Description of Artificial Sequence: Synthetic Antisense oligonucleotide
  misc_feature 1..20: note = Original Sequence: tcaaggaagauggcauuucu
  modified_base 1..2: mod_base = OTHER; note = bicyclic nucleic acid (BNA)
  modified_base 6: mod_base = OTHER; note = bicyclic nucleic acid (BNA)
  modified_base 9: mod_base = OTHER; note = bicyclic nucleic acid (BNA)
  modified_base 2: mod_base = OTHER; note = 5-methyl
  modified_base 14: mod_base = OTHER; note = 5-methyl
  modified_base 19: mod_base = OTHER; note = 5-methyl
  source 1..20: mol_type = other DNA
  modified_base 11: mod_base = OTHER; note = Uracil
  modified_base 16: mod_base = OTHER; note = Uracil
  modified_base 17: mod_base = OTHER; note = Uracil
  modified_base 18: mod_base = OTHER; note = Uracil
  modified_base 20: mod_base = OTHER; note = Uracil
tcaaggaagatggcatttct

SEQ ID NO: 14179 - DNA, 20 bp, synthetic construct
  misc_feature 1..20: note = Description of Artificial Sequence: Synthetic Antisense oligonucleotide
  misc_feature 1..20: note = Original Sequence: tcaaggaagauggcauuucu
  modified_base 1..2: mod_base = OTHER; note = bicyclic nucleic acid (BNA)
  modified_base 13..14: mod_base = OTHER; note = bicyclic nucleic acid (BNA)
  modified_base 2: mod_base = OTHER; note = 5-methyl
  modified_base 14: mod_base = OTHER; note = 5-methyl
  modified_base 19: mod_base = OTHER; note = 5-methyl
  source 1..20: mol_type = other DNA
  modified_base 11: mod_base = OTHER; note = Uracil
  modified_base 16: mod_base = OTHER; note = Uracil
  modified_base 17: mod_base = OTHER; note = Uracil
  modified_base 18: mod_base = OTHER; note = Uracil
  modified_base 20: mod_base = OTHER; note = Uracil
tcaaggaagatggcatttct

SEQ ID NO: 14180 - DNA, 20 bp, synthetic construct
  misc_feature 1..20: note = Description of Artificial Sequence: Synthetic Antisense oligonucleotide
  misc_feature 1..20: note = Original Sequence: tcaaggaagauggcauuucu
  modified_base 1..2: mod_base = OTHER; note = bicyclic nucleic acid (BNA)
  modified_base 6: mod_base = OTHER; note = bicyclic nucleic acid (BNA)
  modified_base 13: mod_base = OTHER; note = bicyclic nucleic acid (BNA)
  modified_base 2: mod_base = OTHER; note = 5-methyl
  modified_base 14: mod_base = OTHER; note = 5-methyl
  modified_base 19: mod_base = OTHER; note = 5-methyl
  source 1..20: mol_type = other DNA
  modified_base 11: mod_base = OTHER; note = Uracil
  modified_base 16: mod_base = OTHER; note = Uracil
  modified_base 17: mod_base = OTHER; note = Uracil
  modified_base 18: mod_base = OTHER; note = Uracil
  modified_base 20: mod_base = OTHER; note = Uracil
tcaaggaagatggcatttct

SEQ ID NO: 14181 - DNA, 20 bp, synthetic construct
  misc_feature 1..20: note = Description of Artificial Sequence: Synthetic Antisense oligonucleotide
  misc_feature 1..20: note = Original Sequence: tcaaggaagauggcauuucu
  modified_base 1..2: mod_base = OTHER; note = bicyclic nucleic acid (BNA)
  modified_base 6: mod_base = OTHER; note = bicyclic nucleic acid (BNA)
  modified_base 19: mod_base = OTHER; note = bicyclic nucleic acid (BNA)
  modified_base 2: mod_base = OTHER; note = 5-methyl
  modified_base 14: mod_base = OTHER; note = 5-methyl
  modified_base 19: mod_base = OTHER; note = 5-methyl
  source 1..20: mol_type = other DNA
  modified_base 11: mod_base = OTHER; note = Uracil
  modified_base 16: mod_base = OTHER; note = Uracil
  modified_base 17: mod_base = OTHER; note = Uracil
  modified_base 18: mod_base = OTHER; note = Uracil
  modified_base 20: mod_base = OTHER; note = Uracil
tcaaggaagatggcatttct

SEQ ID NO: 14182 - DNA, 20 bp, synthetic construct
  misc_feature 1..20: note = Description of Artificial Sequence: Synthetic Antisense oligonucleotide
  misc_feature 1..20: note = Original Sequence: tcaaggaagauggcauuucu
  modified_base 1..2: mod_base = OTHER; note = bicyclic nucleic acid (BNA)
  modified_base 5: mod_base = OTHER; note = bicyclic nucleic acid (BNA)
  modified_base 14: mod_base = OTHER; note = bicyclic nucleic acid (BNA)
  modified_base 2: mod_base = OTHER; note = 5-methyl
  modified_base 14: mod_base = OTHER; note = 5-methyl
  modified_base 19: mod_base = OTHER; note = 5-methyl
  source 1..20: mol_type = other DNA
  modified_base 11: mod_base = OTHER; note = Uracil
  modified_base 16: mod_base = OTHER; note = Uracil
  modified_base 17: mod_base = OTHER; note = Uracil
  modified_base 18: mod_base = OTHER; note = Uracil
  modified_base 20: mod_base = OTHER; note = Uracil
tcaaggaagatggcatttct

SEQ ID NO: 14183 - DNA, 20 bp, synthetic construct
  misc_feature 1..20: note = Description of Artificial Sequence: Synthetic Antisense oligonucleotide
  misc_feature 1..20: note = Original Sequence: tcaaggaagauggcauuucu
  modified_base 1..2: mod_base = OTHER; note = bicyclic nucleic acid (BNA)
  modified_base 12: mod_base = OTHER; note = bicyclic nucleic acid (BNA)
  modified_base 19: mod_base = OTHER; note = bicyclic nucleic acid (BNA)
  modified_base 2: mod_base = OTHER; note = 5-methyl
  modified_base 14: mod_base = OTHER; note = 5-methyl
  modified_base 19: mod_base = OTHER; note = 5-methyl
  source 1..20: mol_type = other DNA
  modified_base 11: mod_base = OTHER; note = Uracil
  modified_base 16: mod_base = OTHER; note = Uracil
  modified_base 17: mod_base = OTHER; note = Uracil
  modified_base 18: mod_base = OTHER; note = Uracil
  modified_base 20: mod_base = OTHER; note = Uracil
tcaaggaagatggcatttct

SEQ ID NO: 14184 - DNA, 20 bp, synthetic construct
  misc_feature 1..20: note = Description of Artificial Sequence: Synthetic Antisense oligonucleotide
  misc_feature 1..20: note = Original Sequence: tcaaggaagauggcauuucu
  modified_base 1..2: mod_base = OTHER; note = bicyclic nucleic acid (BNA)
  modified_base 12: mod_base = OTHER; note = bicyclic nucleic acid (BNA)
  modified_base 14: mod_base = OTHER; note = bicyclic nucleic acid (BNA)
  modified_base 2: mod_base = OTHER; note = 5-methyl
  modified_base 14: mod_base = OTHER; note = 5-methyl
  modified_base 19: mod_base = OTHER; note = 5-methyl
  source 1..20: mol_type = other DNA
  modified_base 11: mod_base = OTHER; note = Uracil
  modified_base 16: mod_base = OTHER; note = Uracil
  modified_base 17: mod_base = OTHER; note = Uracil
  modified_base 18: mod_base = OTHER; note = Uracil
  modified_base 20: mod_base = OTHER; note = Uracil
tcaaggaagatggcatttct

SEQ ID NO: 14185 - DNA, 20 bp, synthetic construct
  misc_feature 1..20: note = Description of Artificial Sequence: Synthetic Antisense oligonucleotide
  misc_feature 1..20: note = Original Sequence: tcaaggaagauggcauuucu
  modified_base 1..2: mod_base = OTHER; note = bicyclic nucleic acid (BNA)
  modified_base 6: mod_base = OTHER; note = bicyclic nucleic acid (BNA)
  modified_base 12: mod_base = OTHER; note = bicyclic nucleic acid (BNA)
  modified_base 2: mod_base = OTHER; note = 5-methyl
  modified_base 14: mod_base = OTHER; note = 5-methyl
  modified_base 19: mod_base = OTHER; note = 5-methyl
  source 1..20: mol_type = other DNA
  modified_base 11: mod_base = OTHER; note = Uracil
  modified_base 16: mod_base = OTHER; note = Uracil
  modified_base 17: mod_base = OTHER; note = Uracil
  modified_base 18: mod_base = OTHER; note = Uracil
  modified_base 20: mod_base = OTHER; note = Uracil
tcaaggaagatggcatttct

SEQ ID NO: 14186 - DNA, 20 bp, synthetic construct
  misc_feature 1..20: note = Description of Artificial Sequence: Synthetic Antisense oligonucleotide
  misc_feature 1..20: note = Original Sequence: tcaaggaagauggcauuucu
  modified_base 1..2: mod_base = OTHER; note = bicyclic nucleic acid (BNA)
  modified_base 5..6: mod_base = OTHER; note = bicyclic nucleic acid (BNA)
  modified_base 2: mod_base = OTHER; note = 5-methyl
  modified_base 14: mod_base = OTHER; note = 5-methyl
  modified_base 19: mod_base = OTHER; note = 5-methyl
  source 1..20: mol_type = other DNA
  modified_base 11: mod_base = OTHER; note = Uracil
  modified_base 16: mod_base = OTHER; note = Uracil
  modified_base 17: mod_base = OTHER; note = Uracil
  modified_base 18: mod_base = OTHER; note = Uracil
  modified_base 20: mod_base = OTHER; note = Uracil
tcaaggaagatggcatttct

SEQ ID NO: 14187 - DNA, 20 bp, synthetic construct
  misc_feature 1..20: note = Description of Artificial Sequence: Synthetic Antisense oligonucleotide
  misc_feature 1..20: note = Original Sequence: tcaaggaagauggcauuucu
  modified_base 1..2: mod_base = OTHER; note = bicyclic nucleic acid (BNA)
  modified_base 9: mod_base = OTHER; note = bicyclic nucleic acid (BNA)
  modified_base 12: mod_base = OTHER; note = bicyclic nucleic acid (BNA)
  modified_base 2: mod_base = OTHER; note = 5-methyl
  modified_base 14: mod_base = OTHER; note = 5-methyl
  modified_base 19: mod_base = OTHER; note = 5-methyl
  source 1..20: mol_type = other DNA
  modified_base 11: mod_base = OTHER; note = Uracil
  modified_base 16: mod_base = OTHER; note = Uracil
  modified_base 17: mod_base = OTHER; note = Uracil
  modified_base 18: mod_base = OTHER; note = Uracil
  modified_base 20: mod_base = OTHER; note = Uracil
tcaaggaagatggcatttct

SEQ ID NO: 14188 - DNA, 20 bp, synthetic construct
  misc_feature 1..20: note = Description of Artificial Sequence: Synthetic Antisense oligonucleotide
  misc_feature 1..20: note = Original Sequence: tcaaggaagauggcauuucu
  modified_base 1..2: mod_base = OTHER; note = bicyclic nucleic acid (BNA)
  modified_base 13: mod_base = OTHER; note = bicyclic nucleic acid (BNA)
  modified_base 19: mod_base = OTHER; note = bicyclic nucleic acid (BNA)
  modified_base 2: mod_base = OTHER; note = 5-methyl
  modified_base 14: mod_base = OTHER; note = 5-methyl
  modified_base 19: mod_base = OTHER; note = 5-methyl
  source 1..20: mol_type = other DNA
  modified_base 11: mod_base = OTHER; note = Uracil
  modified_base 16: mod_base = OTHER; note = Uracil
  modified_base 17: mod_base = OTHER; note = Uracil
  modified_base 18: mod_base = OTHER; note = Uracil
  modified_base 20: mod_base = OTHER; note = Uracil
tcaaggaagatggcatttct

SEQ ID NO: 14189 - DNA, 20 bp, synthetic construct
  misc_feature 1..20: note = Description of Artificial Sequence: Synthetic Antisense oligonucleotide
  misc_feature 1..20: note = Original Sequence: tcaaggaagauggcauuucu
  modified_base 1..2: mod_base = OTHER; note = bicyclic nucleic acid (BNA)
  modified_base 12..13: mod_base = OTHER; note = bicyclic nucleic acid (BNA)
  modified_base 2: mod_base = OTHER; note = 5-methyl
  modified_base 14: mod_base = OTHER; note = 5-methyl
  modified_base 19: mod_base = OTHER; note = 5-methyl
  source 1..20: mol_type = other DNA
  modified_base 11: mod_base = OTHER; note = Uracil
  modified_base 16: mod_base = OTHER; note = Uracil
  modified_base 17: mod_base = OTHER; note = Uracil
  modified_base 18: mod_base = OTHER; note = Uracil
  modified_base 20: mod_base = OTHER; note = Uracil
tcaaggaagatggcatttct

SEQ ID NO: 14190 - DNA, 20 bp, synthetic construct
  misc_feature 1..20: note = Description of Artificial Sequence: Synthetic Antisense oligonucleotide
  misc_feature 1..20: note = Original Sequence: tcaaggaagauggcauuucu
  modified_base 1..2: mod_base = OTHER; note = bicyclic nucleic acid (BNA)
  modified_base 5: mod_base = OTHER; note = bicyclic nucleic acid (BNA)
  modified_base 12: mod_base = OTHER; note = bicyclic nucleic acid (BNA)
  modified_base 2: mod_base = OTHER; note = 5-methyl
  modified_base 14: mod_base = OTHER; note = 5-methyl
  modified_base 19: mod_base = OTHER; note = 5-methyl
  source 1..20: mol_type = other DNA
  modified_base 11: mod_base = OTHER; note = Uracil
  modified_base 16: mod_base = OTHER; note = Uracil
  modified_base 17: mod_base = OTHER; note = Uracil
  modified_base 18: mod_base = OTHER; note = Uracil
  modified_base 20: mod_base = OTHER; note = Uracil
tcaaggaagatggcatttct

SEQ ID NO: 14191 - DNA, 20 bp, synthetic construct
  misc_feature 1..20: note = Description of Artificial Sequence: Synthetic Antisense oligonucleotide
  misc_feature 1..20: note = Original Sequence: tcaaggaagauggcauuucu
  modified_base 1..2: mod_base = OTHER; note = bicyclic nucleic acid (BNA)
  modified_base 9: mod_base = OTHER; note = bicyclic nucleic acid (BNA)
  modified_base 13: mod_base = OTHER; note = bicyclic nucleic acid (BNA)
  modified_base 2: mod_base = OTHER; note = 5-methyl
  modified_base 14: mod_base = OTHER; note = 5-methyl
  modified_base 19: mod_base = OTHER; note = 5-methyl
  source 1..20: mol_type = other DNA
  modified_base 11: mod_base = OTHER; note = Uracil
  modified_base 16: mod_base = OTHER; note = Uracil
  modified_base 17: mod_base = OTHER; note = Uracil
  modified_base 18: mod_base = OTHER; note = Uracil
  modified_base 20: mod_base = OTHER; note = Uracil
tcaaggaagatggcatttct

SEQ ID NO: 14192 - DNA, 20 bp, synthetic construct
  misc_feature 1..20: note = Description of Artificial Sequence: Synthetic Antisense oligonucleotide
  misc_feature 1..20: note = Original Sequence: tcaaggaagauggcauuucu
  modified_base 1..2: mod_base = OTHER; note = bicyclic nucleic acid (BNA)
  modified_base 14: mod_base = OTHER; note = bicyclic nucleic acid (BNA)
  modified_base 19: mod_base = OTHER; note = bicyclic nucleic acid (BNA)
  modified_base 2: mod_base = OTHER; note = 5-methyl
  modified_base 14: mod_base = OTHER; note = 5-methyl
  modified_base 19: mod_base = OTHER; note = 5-methyl
  source 1..20: mol_type = other DNA
  modified_base 11: mod_base = OTHER; note = Uracil
  modified_base 16: mod_base = OTHER; note = Uracil
  modified_base 17: mod_base = OTHER; note = Uracil
  modified_base 18: mod_base = OTHER; note = Uracil
  modified_base 20: mod_base = OTHER; note = Uracil
tcaaggaagatggcatttct

SEQ ID NO: 14193 - DNA, 20 bp, synthetic construct
  misc_feature 1..20: note = Description of Artificial Sequence: Synthetic Antisense oligonucleotide
  misc_feature 1..20: note = Original Sequence: tcaaggaagauggcauuucu
  modified_base 1..2: mod_base = OTHER; note = bicyclic nucleic acid (BNA)
  modified_base 9: mod_base = OTHER; note = bicyclic nucleic acid (BNA)
  modified_base 19: mod_base = OTHER; note = bicyclic nucleic acid (BNA)
  modified_base 2: mod_base = OTHER; note = 5-methyl
  modified_base 14: mod_base = OTHER; note = 5-methyl
  modified_base 19: mod_base = OTHER; note = 5-methyl
  source 1..20: mol_type = other DNA
  modified_base 11: mod_base = OTHER; note = Uracil
  modified_base 16: mod_base = OTHER; note = Uracil
  modified_base 17: mod_base = OTHER; note = Uracil
  modified_base 18: mod_base = OTHER; note = Uracil
  modified_base 20: mod_base = OTHER; note = Uracil
tcaaggaagatggcatttct

SEQ ID NO: 14194 - DNA, 22 bp, synthetic construct
  misc_feature 1..22: note = Description of Artificial Sequence: Synthetic Antisense oligonucleotide
  misc_feature 1..22: note = Original Sequence: tcaaggaagauggcauuucuag
  modified_base 1..2: mod_base = OTHER; note = bicyclic nucleic acid (BNA)
  modified_base 9: mod_base = OTHER; note = bicyclic nucleic acid (BNA)
  modified_base 14: mod_base = OTHER; note = bicyclic nucleic acid (BNA)
  modified_base 2: mod_base = OTHER; note = 5-methyl
  modified_base 14: mod_base = OTHER; note = 5-methyl
  modified_base 19: mod_base = OTHER; note = 5-methyl
  source 1..22: mol_type = other DNA
  modified_base 11: mod_base = OTHER; note = Uracil
  modified_base 16: mod_base = OTHER; note = Uracil
  modified_base 17: mod_base = OTHER; note = Uracil
  modified_base 18: mod_base = OTHER; note = Uracil
  modified_base 20: mod_base = OTHER; note = Uracil
tcaaggaagatggcatttctag

SEQ ID NO: 14195 - DNA, 22 bp, synthetic construct
  misc_feature 1..22: note = Description of Artificial Sequence: Synthetic Antisense oligonucleotide
  misc_feature 1..22: note = Original Sequence: tcaaggaagauggcauuucuag
  modified_base 1..2: mod_base = OTHER; note = bicyclic nucleic acid (BNA)
  modified_base 5: mod_base = OTHER; note = bicyclic nucleic acid (BNA)
  modified_base 9: mod_base = OTHER; note = bicyclic nucleic acid (BNA)
  modified_base 2: mod_base = OTHER; note = 5-methyl
  modified_base 14: mod_base = OTHER; note = 5-methyl
  modified_base 19: mod_base = OTHER; note = 5-methyl
  source 1..22: mol_type = other DNA
  modified_base 11: mod_base = OTHER; note = Uracil
  modified_base 16: mod_base = OTHER; note = Uracil
  modified_base 17: mod_base = OTHER; note = Uracil
  modified_base 18: mod_base = OTHER; note = Uracil
  modified_base 20: mod_base = OTHER; note = Uracil
tcaaggaagatggcatttctag

SEQ ID NO: 14196 - DNA, 22 bp, synthetic construct
  misc_feature 1..22: note = Description of Artificial Sequence: Synthetic Antisense oligonucleotide
  misc_feature 1..22: note = Original Sequence: tcaaggaagauggcauuucuag
  modified_base 1..2: mod_base = OTHER; note = bicyclic nucleic acid (BNA)
  modified_base 5: mod_base = OTHER; note = bicyclic nucleic acid (BNA)
  modified_base 19: mod_base = OTHER; note = bicyclic nucleic acid (BNA)
  modified_base 2: mod_base = OTHER; note = 5-methyl
  modified_base 14: mod_base = OTHER; note = 5-methyl
  modified_base 19: mod_base = OTHER; note = 5-methyl
  source 1..22: mol_type = other DNA
  modified_base 11: mod_base = OTHER; note = Uracil
  modified_base 16: mod_base = OTHER; note = Uracil
  modified_base 17: mod_base = OTHER; note = Uracil
  modified_base 18: mod_base = OTHER; note = Uracil
  modified_base 20: mod_base = OTHER; note = Uracil
tcaaggaagatggcatttctag

SEQ ID NO: 14197 - DNA, 22 bp, synthetic construct
  misc_feature 1..22: note = Description of Artificial Sequence: Synthetic Antisense oligonucleotide
  misc_feature 1..22: note = Original Sequence: tcaaggaagauggcauuucuag
  modified_base 1..2: mod_base = OTHER; note = bicyclic nucleic acid (BNA)
  modified_base 6: mod_base = OTHER; note = bicyclic nucleic acid (BNA)
  modified_base 14: mod_base = OTHER; note = bicyclic nucleic acid (BNA)
  modified_base 2: mod_base = OTHER; note = 5-methyl
  modified_base 14: mod_base = OTHER; note = 5-methyl
  modified_base 19: mod_base = OTHER; note = 5-methyl
  source 1..22: mol_type = other DNA
  modified_base 11: mod_base = OTHER; note = Uracil
  modified_base 16: mod_base = OTHER; note = Uracil
  modified_base 17: mod_base = OTHER; note = Uracil
  modified_base 18: mod_base = OTHER; note = Uracil
  modified_base 20: mod_base = OTHER; note = Uracil
tcaaggaagatggcatttctag

SEQ ID NO: 14198 - DNA, 22 bp, synthetic construct
  misc_feature 1..22: note = Description of Artificial Sequence: Synthetic Antisense oligonucleotide
  misc_feature 1..22: note = Original Sequence: tcaaggaagauggcauuucuag
  modified_base 1..2: mod_base = OTHER; note = bicyclic nucleic acid (BNA)
  modified_base 5: mod_base = OTHER; note = bicyclic nucleic acid (BNA)
  modified_base 13: mod_base = OTHER; note = bicyclic nucleic acid (BNA)
  modified_base 2: mod_base = OTHER; note = 5-methyl
  modified_base 14: mod_base = OTHER; note = 5-methyl
  modified_base 19: mod_base = OTHER; note = 5-methyl
  source 1..22: mol_type = other DNA
  modified_base 11: mod_base = OTHER; note = Uracil
  modified_base 16: mod_base = OTHER; note = Uracil
  modified_base 17: mod_base = OTHER; note = Uracil
  modified_base 18: mod_base = OTHER; note = Uracil
  modified_base 20: mod_base = OTHER; note = Uracil
tcaaggaagatggcatttctag

SEQ ID NO: 14199 - DNA, 22 bp, synthetic construct
  misc_feature 1..22: note = Description of Artificial Sequence: Synthetic Antisense oligonucleotide
  misc_feature 1..22: note = Original Sequence: tcaaggaagauggcauuucuag
  modified_base 1..2: mod_base = OTHER; note = bicyclic nucleic acid (BNA)
  modified_base 6: mod_base = OTHER; note = bicyclic nucleic acid (BNA)
  modified_base 9: mod_base = OTHER; note = bicyclic nucleic acid (BNA)
  modified_base 2: mod_base = OTHER; note = 5-methyl
  modified_base 14: mod_base = OTHER; note = 5-methyl
  modified_base 19: mod_base = OTHER; note = 5-methyl
  source 1..22: mol_type = other DNA
  modified_base 11: mod_base = OTHER; note = Uracil
  modified_base 16: mod_base = OTHER; note = Uracil
  modified_base 17: mod_base = OTHER; note = Uracil
  modified_base 18: mod_base = OTHER; note = Uracil
  modified_base 20: mod_base = OTHER; note = Uracil
tcaaggaagatggcatttctag

SEQ ID NO: 14200 - DNA, 22 bp, synthetic construct
  misc_feature 1..22: note = Description of Artificial Sequence: Synthetic Antisense oligonucleotide
  misc_feature 1..22: note = Original Sequence: tcaaggaagauggcauuucuag
  modified_base 1..2: mod_base = OTHER; note = bicyclic nucleic acid (BNA)
  modified_base 13..14: mod_base = OTHER; note = bicyclic nucleic acid (BNA)
  modified_base 2: mod_base = OTHER; note = 5-methyl
  modified_base 14: mod_base = OTHER; note = 5-methyl
  modified_base 19: mod_base = OTHER; note = 5-methyl
  source 1..22: mol_type = other DNA
  modified_base 11: mod_base = OTHER; note = Uracil
  modified_base 16: mod_base = OTHER; note = Uracil
  modified_base 17: mod_base = OTHER; note = Uracil
  modified_base 18: mod_base = OTHER; note = Uracil
  modified_base 20: mod_base = OTHER; note = Uracil
tcaaggaagatggcatttctag

SEQ ID NO: 14201 - DNA, 22 bp, synthetic construct
  misc_feature 1..22: note = Description of Artificial Sequence: Synthetic Antisense oligonucleotide
  misc_feature 1..22: note = Original Sequence: tcaaggaagauggcauuucuag
  modified_base 1..2: mod_base = OTHER; note = bicyclic nucleic acid (BNA)
  modified_base 6: mod_base = OTHER; note = bicyclic nucleic acid (BNA)
  modified_base 13: mod_base = OTHER; note = bicyclic nucleic acid (BNA)
  modified_base 2: mod_base = OTHER; note = 5-methyl
  modified_base 14: mod_base = OTHER; note = 5-methyl
  modified_base 19: mod_base = OTHER; note = 5-methyl
  source 1..22: mol_type = other DNA
  modified_base 11: mod_base = OTHER; note = Uracil
  modified_base 16: mod_base = OTHER; note = Uracil
  modified_base 17: mod_base = OTHER; note = Uracil
  modified_base 18: mod_base = OTHER; note = Uracil
  modified_base 20: mod_base = OTHER; note = Uracil
tcaaggaagatggcatttctag

SEQ ID NO: 14202 - DNA, 22 bp, synthetic construct
  misc_feature 1..22: note = Description of Artificial Sequence: Synthetic Antisense oligonucleotide
  misc_feature 1..22: note = Original Sequence: tcaaggaagauggcauuucuag
  modified_base 1..2: mod_base = OTHER; note = bicyclic nucleic acid (BNA)
  modified_base 6: mod_base = OTHER; note = bicyclic nucleic acid (BNA)
  modified_base 19: mod_base = OTHER; note = bicyclic nucleic acid (BNA)
  modified_base 2: mod_base = OTHER; note = 5-methyl
  modified_base 14: mod_base = OTHER; note = 5-methyl
  modified_base 19: mod_base = OTHER; note = 5-methyl
  source 1..22: mol_type = other DNA
  modified_base 11: mod_base = OTHER; note = Uracil
  modified_base 16: mod_base = OTHER; note = Uracil
  modified_base 17: mod_base = OTHER; note = Uracil
  modified_base 18: mod_base = OTHER; note = Uracil
  modified_base 20: mod_base = OTHER; note = Uracil
tcaaggaagatggcatttctag

SEQ ID NO: 14203 - DNA, 22 bp, synthetic construct
  misc_feature 1..22: note = Description of Artificial Sequence: Synthetic Antisense oligonucleotide
  misc_feature 1..22: note = Original Sequence: tcaaggaagauggcauuucuag
  modified_base 1..2: mod_base = OTHER; note = bicyclic nucleic acid (BNA)
  modified_base 5: mod_base = OTHER; note = bicyclic nucleic acid (BNA)
  modified_base 14: mod_base = OTHER; note = bicyclic nucleic acid (BNA)
  modified_base 2: mod_base = OTHER; note = 5-methyl
  modified_base 14: mod_base = OTHER; note = 5-methyl
  modified_base 19: mod_base = OTHER; note = 5-methyl
  source 1..22: mol_type = other DNA
  modified_base 11: mod_base = OTHER; note = Uracil
  modified_base 16: mod_base = OTHER; note = Uracil
  modified_base 17: mod_base = OTHER; note = Uracil
  modified_base 18: mod_base = OTHER; note = Uracil
  modified_base 20: mod_base = OTHER; note = Uracil
tcaaggaagatggcatttctag

SEQ ID NO: 14204 - DNA, 22 bp, synthetic construct
  misc_feature 1..22: note = Description of Artificial Sequence: Synthetic Antisense oligonucleotide
  misc_feature 1..22: note = Original Sequence: tcaaggaagauggcauuucuag
  modified_base 1..2: mod_base = OTHER; note = bicyclic nucleic acid (BNA)
  modified_base 12: mod_base = OTHER; note = bicyclic nucleic acid (BNA)
  modified_base 19: mod_base = OTHER; note = bicyclic nucleic acid (BNA)
  modified_base 2: mod_base = OTHER; note = 5-methyl
  modified_base 14: mod_base = OTHER; note = 5-methyl
  modified_base 19: mod_base = OTHER; note = 5-methyl
  source 1..22: mol_type = other DNA
  modified_base 11: mod_base = OTHER; note = Uracil
  modified_base 16: mod_base = OTHER; note = Uracil
  modified_base 17: mod_base = OTHER; note = Uracil
  modified_base 18: mod_base = OTHER; note = Uracil
  modified_base 20: mod_base = OTHER; note = Uracil
tcaaggaagatggcatttctag

SEQ ID NO: 14205 - DNA, 22 bp, synthetic construct
  misc_feature 1..22: note = Description of Artificial Sequence: Synthetic Antisense oligonucleotide
  misc_feature 1..22: note = Original Sequence: tcaaggaagauggcauuucuag
  modified_base 1..2: mod_base = OTHER; note = bicyclic nucleic acid (BNA)
  modified_base 12: mod_base = OTHER; note = bicyclic nucleic acid (BNA)
  modified_base 14: mod_base = OTHER; note = bicyclic nucleic acid (BNA)
  modified_base 2: mod_base = OTHER; note = 5-methyl
  modified_base 14: mod_base = OTHER; note = 5-methyl
  modified_base 19: mod_base = OTHER; note = 5-methyl
  source 1..22: mol_type = other DNA
  modified_base 11: mod_base = OTHER; note = Uracil
  modified_base 16: mod_base = OTHER; note = Uracil
  modified_base 17: mod_base = OTHER; note = Uracil
  modified_base 18: mod_base = OTHER; note = Uracil
  modified_base 20: mod_base = OTHER; note = Uracil
tcaaggaagatggcatttctag

SEQ ID NO: 14206 - DNA, 22 bp, synthetic construct
  misc_feature 1..22: note = Description of Artificial Sequence: Synthetic Antisense oligonucleotide
  misc_feature 1..22: note = Original Sequence: tcaaggaagauggcauuucuag
  modified_base 1..2: mod_base = OTHER; note = bicyclic nucleic acid (BNA)
  modified_base 6: mod_base = OTHER; note = bicyclic nucleic acid (BNA)
  modified_base 12: mod_base = OTHER; note = bicyclic nucleic acid (BNA)
  modified_base 2: mod_base = OTHER; note = 5-methyl
  modified_base 14: mod_base = OTHER; note = 5-methyl
  modified_base 19: mod_base = OTHER; note = 5-methyl
  source 1..22: mol_type = other DNA
  modified_base 11: mod_base = OTHER; note = Uracil
  modified_base 16: mod_base = OTHER; note = Uracil
  modified_base 17: mod_base = OTHER; note = Uracil
  modified_base 18: mod_base = OTHER; note = Uracil
  modified_base 20: mod_base = OTHER; note = Uracil
tcaaggaagatggcatttctag

SEQ ID NO: 14207 - DNA, 22 bp, synthetic construct
  misc_feature 1..22: note = Description of Artificial Sequence: Synthetic Antisense oligonucleotide
  misc_feature 1..22: note = Original Sequence: tcaaggaagauggcauuucuag
  modified_base 1..2: mod_base = OTHER; note = bicyclic nucleic acid (BNA)
  modified_base 5..6: mod_base = OTHER; note = bicyclic nucleic acid (BNA)
  modified_base 2: mod_base = OTHER; note = 5-methyl
  modified_base 14: mod_base = OTHER; note = 5-methyl
  modified_base 19: mod_base = OTHER; note = 5-methyl
  source 1..22: mol_type = other DNA
  modified_base 11: mod_base = OTHER; note = Uracil
  modified_base 16: mod_base = OTHER; note = Uracil
  modified_base 17: mod_base = OTHER; note = Uracil
  modified_base 18: mod_base = OTHER; note = Uracil
  modified_base 20: mod_base = OTHER; note = Uracil
tcaaggaagatggcatttctag

SEQ ID NO: 14208 - DNA, 22 bp, synthetic construct
  misc_feature 1..22: note = Description of Artificial Sequence: Synthetic Antisense oligonucleotide
  misc_feature 1..22: note = Original Sequence: tcaaggaagauggcauuucuag
  modified_base 1..2: mod_base = OTHER; note = bicyclic nucleic acid (BNA)
  modified_base 9: mod_base = OTHER; note = bicyclic nucleic acid (BNA)
  modified_base 12: mod_base = OTHER; note = bicyclic nucleic acid (BNA)
  modified_base 2: mod_base = OTHER; note = 5-methyl
  modified_base 14: mod_base = OTHER; note = 5-methyl
  modified_base 19: mod_base = OTHER; note = 5-methyl
  source 1..22: mol_type = other DNA
  modified_base 11: mod_base = OTHER; note = Uracil
  modified_base 16: mod_base = OTHER; note = Uracil
  modified_base 17: mod_base = OTHER; note = Uracil
  modified_base 18: mod_base = OTHER; note = Uracil
  modified_base 20: mod_base = OTHER; note = Uracil
tcaaggaagatggcatttctag

SEQ ID NO: 14209 - DNA, 22 bp, synthetic construct
  misc_feature 1..22: note = Description of Artificial Sequence: Synthetic Antisense oligonucleotide
  misc_feature 1..22: note = Original Sequence: tcaaggaagauggcauuucuag
  modified_base 1..2: mod_base = OTHER; note = bicyclic nucleic acid (BNA)
  modified_base 13: mod_base = OTHER; note = bicyclic nucleic acid (BNA)
  modified_base 19: mod_base = OTHER; note = bicyclic nucleic acid (BNA)
  modified_base 2: mod_base = OTHER; note = 5-methyl
  modified_base 14: mod_base = OTHER; note = 5-methyl
  modified_base 19: mod_base = OTHER; note = 5-methyl
  source 1..22: mol_type = other DNA
  modified_base 11: mod_base = OTHER; note = Uracil
  modified_base 16: mod_base = OTHER; note = Uracil
  modified_base 17: mod_base = OTHER; note = Uracil
  modified_base 18: mod_base = OTHER; note = Uracil
  modified_base 20: mod_base = OTHER; note = Uracil
tcaaggaagatggcatttctag

SEQ ID NO: 14210 - DNA, 22 bp, synthetic construct
  misc_feature 1..22: note = Description of Artificial Sequence: Synthetic Antisense oligonucleotide
  misc_feature 1..22: note = Original Sequence: tcaaggaagauggcauuucuag
  modified_base 1..2: mod_base = OTHER; note = bicyclic nucleic acid (BNA)
  modified_base 12..13: mod_base = OTHER; note = bicyclic nucleic acid (BNA)
  modified_base 2: mod_base = OTHER; note = 5-methyl
  modified_base 14: mod_base = OTHER; note = 5-methyl
  modified_base 19: mod_base = OTHER; note = 5-methyl
  source 1..22: mol_type = other DNA
  modified_base 11: mod_base = OTHER; note = Uracil
  modified_base 16: mod_base = OTHER; note = Uracil
  modified_base 17: mod_base = OTHER; note = Uracil
  modified_base 18: mod_base = OTHER; note = Uracil
  modified_base 20: mod_base = OTHER; note = Uracil
tcaaggaagatggcatttctag

SEQ ID NO: 14211 - DNA, 22 bp, synthetic construct
  misc_feature 1..22: note = Description of Artificial Sequence: Synthetic Antisense oligonucleotide
  misc_feature 1..22: note = Original Sequence: tcaaggaagauggcauuucuag
  modified_base 1..2: mod_base = OTHER; note = bicyclic nucleic acid (BNA)
  modified_base 5: mod_base = OTHER; note = bicyclic nucleic acid (BNA)
  modified_base 12: mod_base = OTHER; note = bicyclic nucleic acid (BNA)
  modified_base 2: mod_base = OTHER; note = 5-methyl
  modified_base 14: mod_base = OTHER; note = 5-methyl
  modified_base 19: mod_base = OTHER; note = 5-methyl
  source 1..22: mol_type = other DNA
  modified_base 11: mod_base = OTHER; note = Uracil
  modified_base 16: mod_base = OTHER; note = Uracil
  modified_base 17: mod_base = OTHER; note = Uracil
  modified_base 18: mod_base = OTHER; note = Uracil
  modified_base 20: mod_base = OTHER; note = Uracil
tcaaggaagatggcatttctag

SEQ ID NO: 14212 - DNA, 22 bp, synthetic construct
  misc_feature 1..22: note = Description of Artificial Sequence: Synthetic Antisense oligonucleotide
  misc_feature 1..22: note = Original Sequence: tcaaggaagauggcauuucuag
  modified_base 1..2: mod_base = OTHER; note = bicyclic nucleic acid (BNA)
  modified_base 9: mod_base = OTHER; note = bicyclic nucleic acid (BNA)
  modified_base 13: mod_base = OTHER; note = bicyclic nucleic acid (BNA)
  modified_base 2: mod_base = OTHER; note = 5-methyl
  modified_base 14: mod_base = OTHER; note = 5-methyl
  modified_base 19: mod_base = OTHER; note = 5-methyl
  source 1..22: mol_type = other DNA
  modified_base 11: mod_base = OTHER; note = Uracil
  modified_base 16: mod_base = OTHER; note = Uracil
  modified_base 17: mod_base = OTHER; note = Uracil
  modified_base 18: mod_base = OTHER; note = Uracil
  modified_base 20: mod_base = OTHER; note = Uracil
tcaaggaagatggcatttctag

SEQ ID NO: 14213 - DNA, 22 bp, synthetic construct
  misc_feature 1..22: note = Description of Artificial Sequence: Synthetic Antisense oligonucleotide
  misc_feature 1..22: note = Original Sequence: tcaaggaagauggcauuucuag
  modified_base 1..2: mod_base = OTHER; note = bicyclic nucleic acid (BNA)
  modified_base 14: mod_base = OTHER; note = bicyclic nucleic acid (BNA)
  modified_base 19: mod_base = OTHER; note = bicyclic nucleic acid (BNA)
  modified_base 2: mod_base = OTHER; note = 5-methyl
  modified_base 14: mod_base = OTHER; note = 5-methyl
  modified_base 19: mod_base = OTHER; note = 5-methyl
  source 1..22: mol_type = other DNA
  modified_base 11: mod_base = OTHER; note = Uracil
  modified_base 16: mod_base = OTHER; note = Uracil
  modified_base 17: mod_base = OTHER; note = Uracil
  modified_base 18: mod_base = OTHER; note = Uracil
  modified_base 20: mod_base = OTHER; note = Uracil
tcaaggaagatggcatttctag

SEQ ID NO: 14214 - DNA, 22 bp, synthetic construct
  misc_feature 1..22: note = Description of Artificial Sequence: Synthetic Antisense oligonucleotide
  misc_feature 1..22: note = Original Sequence: tcaaggaagauggcauuucuag
  modified_base 1..2: mod_base = OTHER; note = bicyclic nucleic acid (BNA)
  modified_base 9: mod_base = OTHER; note = bicyclic nucleic acid (BNA)
  modified_base 19: mod_base = OTHER; note = bicyclic nucleic acid (BNA)
  modified_base 2: mod_base = OTHER; note = 5-methyl
  modified_base 14: mod_base = OTHER; note = 5-methyl
  modified_base 19: mod_base = OTHER; note = 5-methyl
  source 1..22: mol_type = other DNA
  modified_base 11: mod_base = OTHER; note = Uracil
  modified_base 16: mod_base = OTHER; note = Uracil
  modified_base 17: mod_base = OTHER; note = Uracil
  modified_base 18: mod_base = OTHER; note = Uracil
  modified_base 20: mod_base = OTHER; note = Uracil
tcaaggaagatggcatttctag

SEQ ID NO: 14215 - DNA, 18 bp, synthetic construct
  misc_feature 1..18: note = Description of Artificial Sequence: Synthetic Antisense oligonucleotide
  modified_base 1..2: mod_base = OTHER; note = bicyclic nucleic acid (BNA)
  modified_base 9: mod_base = OTHER; note = bicyclic nucleic acid (BNA)
  source 1..18: mol_type = other DNA
ggtaagttctgtccaagc

SEQ ID NO: 14216 - DNA, 18 bp, synthetic construct
  misc_feature 1..18: note = Description of Artificial Sequence: Synthetic Antisense oligonucleotide
  modified_base 1..2: mod_base = OTHER; note = bicyclic nucleic acid (BNA)
  modified_base 11: mod_base = OTHER; note = bicyclic nucleic acid (BNA)
  source 1..18: mol_type = other DNA
ggtaagttctgtccaagc

SEQ ID NO: 14217 - DNA, 18 bp, synthetic construct
  misc_feature 1..18: note = Description of Artificial Sequence: Synthetic Antisense oligonucleotide
  modified_base 1..2: mod_base = OTHER; note = bicyclic nucleic acid (BNA)
  modified_base 6: mod_base = OTHER; note = bicyclic nucleic acid (BNA)
  source 1..18: mol_type = other DNA
ggtaagttctgtccaagc

SEQ ID NO: 14218 - DNA, 18 bp, synthetic construct
  misc_feature 1..18: note = Description of Artificial Sequence: Synthetic Antisense oligonucleotide
  modified_base 1..2: mod_base = OTHER; note = bicyclic nucleic acid (BNA)
  modified_base 17: mod_base = OTHER; note = bicyclic nucleic acid (BNA)
  source 1..18: mol_type = other DNA
ggtaagttctgtccaagc

SEQ ID NO: 14219 - DNA, 18 bp, synthetic construct
  misc_feature 1..18: note = Description of Artificial Sequence: Synthetic Antisense oligonucleotide
  modified_base 1..2: mod_base = OTHER; note = bicyclic nucleic acid (BNA)
  modified_base 13: mod_base = OTHER; note = bicyclic nucleic acid (BNA)
  source 1..18: mol_type = other DNA
ggtaagttctgtccaagc

SEQ ID NO: 14220 - DNA, 18 bp, synthetic construct
  misc_feature 1..18: note = Description of Artificial Sequence: Synthetic Antisense oligonucleotide
  modified_base 1..2: mod_base = OTHER; note = bicyclic nucleic acid (BNA)
  modified_base 14: mod_base = OTHER; note = bicyclic nucleic acid (BNA)
  source 1..18: mol_type = other DNA
ggtaagttctgtccaagc

SEQ ID NO: 14221 - DNA, 18 bp, synthetic construct
  misc_feature 1..18: note = Description of Artificial Sequence: Synthetic Antisense oligonucleotide
  modified_base 1..2: mod_base = OTHER; note = bicyclic nucleic acid (BNA)
  modified_base 16: mod_base = OTHER; note = bicyclic nucleic acid (BNA)
  source 1..18: mol_type = other DNA
gtaagttctgtccaagcc

SEQ ID NO: 14222 - DNA, 18 bp, synthetic construct
  misc_feature 1..18: note = Description of Artificial Sequence: Synthetic Antisense oligonucleotide
  modified_base 1..2: mod_base = OTHER; note = bicyclic nucleic acid (BNA)
  modified_base 10: mod_base = OTHER; note = bicyclic nucleic acid (BNA)
  source 1..18: mol_type = other DNA
gtaagttctgtccaagcc

SEQ ID NO: 14223 - DNA, 18 bp, synthetic construct
  misc_feature 1..18: note = Description of Artificial Sequence: Synthetic Antisense oligonucleotide
  modified_base 1..2: mod_base = OTHER; note = bicyclic nucleic acid (BNA)
  modified_base 5: mod_base = OTHER; note = bicyclic nucleic acid (BNA)
  source 1..18: mol_type = other DNA
gtaagttctgtccaagcc

SEQ ID NO: 14224 - DNA, 18 bp, synthetic construct
  misc_feature 1..18: note = Description of Artificial Sequence: Synthetic Antisense oligonucleotide
  modified_base 1..2: mod_base = OTHER; note = bicyclic nucleic acid (BNA)
  modified_base 17: mod_base = OTHER; note = bicyclic nucleic acid (BNA)
  source 1..18: mol_type = other DNA
gtaagttctgtccaagcc

SEQ ID NO: 14225 - DNA, 18 bp, synthetic construct
  misc_feature 1..18: note = Description of Artificial Sequence: Synthetic Antisense oligonucleotide
  modified_base 1..2: mod_base = OTHER; note = bicyclic nucleic acid (BNA)
  modified_base 12: mod_base = OTHER; note = bicyclic nucleic acid (BNA)
  source 1..18: mol_type = other DNA
gtaagttctgtccaagcc

SEQ ID NO: 14226 - DNA, 18 bp, synthetic construct
  misc_feature 1..18: note = Description of Artificial Sequence: Synthetic Antisense oligonucleotide
  modified_base 1..2: mod_base = OTHER; note = bicyclic nucleic acid (BNA)
  modified_base 13: mod_base = OTHER; note = bicyclic nucleic acid (BNA)
  source 1..18: mol_type = other DNA
gtaagttctgtccaagcc

SEQ ID NO: 14227 - DNA, 18 bp, synthetic construct
  misc_feature 1..18: note = Description of Artificial Sequence: Synthetic Antisense oligonucleotide
  modified_base 1..2: mod_base = OTHER; note = bicyclic nucleic acid (BNA)
  modified_base 8: mod_base = OTHER; note = bicyclic nucleic acid (BNA)
  source 1..18: mol_type = other DNA
gtaagttctgtccaagcc

SEQ ID NO: 14228 - DNA, 18 bp, synthetic construct
  misc_feature 1..18: note = Description of Artificial Sequence: Synthetic Antisense oligonucleotide
  modified_base 1..2: mod_base = OTHER; note = bicyclic nucleic acid (BNA)
  modified_base 4: mod_base = OTHER; note = bicyclic nucleic acid (BNA)
  source 1..18: mol_type = other DNA
agtcggtaagttctgtcc

SEQ ID NO: 14229 - DNA, 18 bp, synthetic construct
  misc_feature 1..18: note = Description of Artificial Sequence: Synthetic Antisense oligonucleotide
  modified_base 1..2: mod_base = OTHER; note = bicyclic nucleic acid (BNA)
  modified_base 10: mod_base = OTHER; note = bicyclic nucleic acid (BNA)
  source 1..18: mol_type = other DNA
agtcggtaagttctgtcc

SEQ ID NO: 14230 - DNA, 18 bp, synthetic construct
  misc_feature 1..18: note = Description of Artificial Sequence: Synthetic Antisense oligonucleotide
  modified_base 1..2: mod_base = OTHER; note = bicyclic nucleic acid (BNA)
  modified_base 5: mod_base = OTHER; note = bicyclic nucleic acid (BNA)
  source 1..18: mol_type = other DNA
agtcggtaagttctgtcc

SEQ ID NO: 14231 - DNA, 18 bp, synthetic construct
  misc_feature 1..18: note = Description of Artificial Sequence: Synthetic Antisense oligonucleotide
  modified_base 1..2: mod_base = OTHER; note = bicyclic nucleic acid (BNA)
  modified_base 6: mod_base = OTHER; note = bicyclic nucleic acid (BNA)
  source 1..18: mol_type = other DNA
agtcggtaagttctgtcc

SEQ ID NO: 14232 - DNA, 18 bp, synthetic construct
  misc_feature 1..18: note = Description of Artificial Sequence: Synthetic Antisense oligonucleotide
  modified_base 1..2: mod_base = OTHER; note = bicyclic nucleic acid (BNA)
  modified_base 17: mod_base = OTHER; note = bicyclic nucleic acid (BNA)
  source 1..18: mol_type = other DNA
agtcggtaagttctgtcc

SEQ ID NO: 14233 - DNA, 18 bp, synthetic construct
  misc_feature 1..18: note = Description of Artificial Sequence: Synthetic Antisense oligonucleotide
  modified_base 1..2: mod_base = OTHER; note = bicyclic nucleic acid (BNA)
  modified_base 13: mod_base = OTHER; note = bicyclic nucleic acid (BNA)
  source 1..18: mol_type = other DNA
agtcggtaagttctgtcc

SEQ ID NO: 14234 - DNA, 18 bp, synthetic construct
  misc_feature 1..18: note = Description of Artificial Sequence: Synthetic Antisense oligonucleotide
  modified_base 1..2: mod_base = OTHER; note = bicyclic nucleic acid (BNA)
  modified_base 15: mod_base = OTHER; note = bicyclic nucleic acid (BNA)
  source 1..18: mol_type = other DNA
agtcggtaagttctgtcc

SEQ ID NO: 14235 - DNA, 18 bp, synthetic construct
  misc_feature 1..18: note = Description of Artificial Sequence: Synthetic Antisense oligonucleotide
  modified_base 1..3: mod_base = OTHER; note = bicyclic nucleic acid (BNA)
  source 1..18: mol_type = other DNA
ctgtccaagcccggttga

SEQ ID NO: 14236 - DNA, 18 bp, synthetic construct
  misc_feature 1..18: note = Description of Artificial Sequence: Synthetic Antisense oligonucleotide
  modified_base 1..2: mod_base = OTHER; note = bicyclic nucleic acid (BNA)
  modified_base 9: mod_base = OTHER; note = bicyclic nucleic acid (BNA)
  source 1..18: mol_type = other DNA
ctgtccaagcccggttga

SEQ ID NO: 14237 - DNA, 18 bp, synthetic construct
  misc_feature 1..18: note = Description of Artificial Sequence: Synthetic Antisense oligonucleotide
  modified_base 1..2: mod_base = OTHER; note = bicyclic nucleic acid (BNA)
  modified_base 10: mod_base = OTHER; note = bicyclic nucleic acid (BNA)
  source 1..18: mol_type = other DNA
ctgtccaagcccggttga

SEQ ID NO: 14238 - DNA, 18 bp, synthetic construct
  misc_feature 1..18: note = Description of Artificial Sequence: Synthetic Antisense oligonucleotide
  modified_base 1..2: mod_base = OTHER; note = bicyclic nucleic acid (BNA)
  modified_base 5: mod_base = OTHER; note = bicyclic nucleic acid (BNA)
  source 1..18: mol_type = other DNA
ctgtccaagcccggttga

SEQ ID NO: 14239 - DNA, 18 bp, synthetic construct
  misc_feature 1..18: note = Description of Artificial Sequence: Synthetic Antisense oligonucleotide
  modified_base 1..2: mod_base = OTHER; note = bicyclic nucleic acid (BNA)
  modified_base 11: mod_base = OTHER; note = bicyclic nucleic acid (BNA)
  source 1..18: mol_type = other DNA
ctgtccaagcccggttga

SEQ ID NO: 14240 - DNA, 18 bp, synthetic construct
  misc_feature 1..18: note = Description of Artificial Sequence: Synthetic Antisense oligonucleotide
  modified_base 1..2: mod_base = OTHER; note = bicyclic nucleic acid (BNA)
  modified_base 6: mod_base = OTHER; note = bicyclic nucleic acid (BNA)
  source 1..18: mol_type = other DNA
ctgtccaagcccggttga

SEQ ID NO: 14241 - DNA, 18 bp, synthetic construct
  misc_feature 1..18: note = Description of Artificial Sequence: Synthetic Antisense oligonucleotide
  modified_base 1..2: mod_base = OTHER; note = bicyclic nucleic acid (BNA)
  modified_base 17: mod_base = OTHER; note = bicyclic nucleic acid (BNA)
  source 1..18: mol_type = other DNA
ctgtccaagcccggttga

SEQ ID NO: 14242 - DNA, 18 bp, synthetic construct
  misc_feature 1..18: note = Description of Artificial Sequence: Synthetic Antisense oligonucleotide
  modified_base 1..2: mod_base = OTHER; note = bicyclic nucleic acid (BNA)
  modified_base 12: mod_base = OTHER; note = bicyclic nucleic acid (BNA)
  source 1..18: mol_type = other DNA
ctgtccaagcccggttga

SEQ ID NO: 14243 - DNA, 18 bp, synthetic construct
  misc_feature 1..18: note = Description of Artificial Sequence: Synthetic Antisense oligonucleotide
  modified_base 1..2: mod_base = OTHER; note = bicyclic nucleic acid (BNA)
  modified_base 13: mod_base = OTHER; note = bicyclic nucleic acid (BNA)
  source 1..18: mol_type = other DNA
ctgtccaagcccggttga

SEQ ID NO: 14244 - DNA, 18 bp, synthetic construct
  misc_feature 1..18: note = Description of Artificial Sequence: Synthetic Antisense oligonucleotide
  modified_base 1..2: mod_base = OTHER; note = bicyclic nucleic acid (BNA)
  modified_base 14: mod_base = OTHER; note = bicyclic nucleic acid (BNA)
  source 1..18: mol_type = other DNA
ctgtccaagcccggttga

SEQ ID NO: 14245 - DNA, 18 bp, synthetic construct
  misc_feature 1..18: note = Description of Artificial Sequence: Synthetic Antisense oligonucleotide
  modified_base 1..2: mod_base = OTHER; note = bicyclic nucleic acid (BNA)
  modified_base 6: mod_base = OTHER; note = bicyclic nucleic acid (BNA)
  modified_base 11: mod_base = OTHER; note = bicyclic nucleic acid (BNA)
  source 1..18: mol_type = other DNA
ggtaagttctgtccaagc

SEQ ID NO: 14246 - DNA, 18 bp, synthetic construct
  misc_feature 1..18: note = Description of Artificial Sequence: Synthetic Antisense oligonucleotide
  modified_base 1..2: mod_base = OTHER; note = bicyclic nucleic acid (BNA)
  modified_base 9: mod_base = OTHER; note = bicyclic nucleic acid (BNA)
  modified_base 14: mod_base = OTHER; note = bicyclic nucleic acid (BNA)
  source 1..18: mol_type = other DNA
ggtaagttctgtccaagc

SEQ ID NO: 14247 - DNA, 18 bp, synthetic construct
  misc_feature 1..18: note = Description of Artificial Sequence: Synthetic Antisense oligonucleotide
  modified_base 1..2: mod_base = OTHER; note = bicyclic nucleic acid (BNA)
  modified_base 6: mod_base = OTHER; note = bicyclic nucleic acid (BNA)
  modified_base 17: mod_base = OTHER; note = bicyclic nucleic acid (BNA)
  source 1..18: mol_type = other DNA
ggtaagttctgtccaagc

SEQ ID NO: 14248 - DNA, 18 bp, synthetic construct
  misc_feature 1..18: note = Description of Artificial Sequence: Synthetic Antisense oligonucleotide
  modified_base 1..2: mod_base = OTHER; note = bicyclic nucleic acid (BNA)
  modified_base 9: mod_base = OTHER; note = bicyclic nucleic acid (BNA)
  modified_base 13: mod_base = OTHER; note = bicyclic nucleic acid (BNA)
  source 1..18: mol_type = other DNA
ggtaagttctgtccaagc

SEQ ID NO: 14249 - DNA, 18 bp, synthetic construct
  misc_feature 1..18: note = Description of Artificial Sequence: Synthetic Antisense oligonucleotide
  modified_base 1..2: mod_base = OTHER; note = bicyclic nucleic acid (BNA)
  modified_base 13..14: mod_base = OTHER; note = bicyclic nucleic acid (BNA)
  source 1..18: mol_type = other DNA
ggtaagttctgtccaagc

SEQ ID NO: 14250 - DNA, 18 bp, synthetic construct
  misc_feature 1..18: note = Description of Artificial Sequence: Synthetic Antisense oligonucleotide
  modified_base 1..2: mod_base = OTHER; note = bicyclic nucleic acid (BNA)
  modified_base 11: mod_base = OTHER; note = bicyclic nucleic acid (BNA)
  modified_base 17: mod_base = OTHER; note = bicyclic nucleic acid (BNA)
  source 1..18: mol_type = other DNA
ggtaagttctgtccaagc

SEQ ID NO: 14251 - DNA, 18 bp, synthetic construct
  misc_feature 1..18: note = Description of Artificial Sequence: Synthetic Antisense oligonucleotide
  modified_base 1..2: mod_base = OTHER; note = bicyclic nucleic acid (BNA)
  modified_base 11: mod_base = OTHER; note = bicyclic nucleic acid (BNA)
  modified_base 14: mod_base = OTHER; note = bicyclic nucleic acid (BNA)
  source 1..18: mol_type = other DNA
ggtaagttctgtccaagc

SEQ ID NO: 14252 - DNA, 18 bp, synthetic construct
  misc_feature 1..18: note = Description of Artificial Sequence: Synthetic Antisense oligonucleotide
  modified_base 1..2: mod_base = OTHER; note = bicyclic nucleic acid (BNA)
  modified_base 6: mod_base = OTHER; note = bicyclic nucleic acid (BNA)
  modified_base 13: mod_base = OTHER; note = bicyclic nucleic acid (BNA)
  source 1..18: mol_type = other DNA
ggtaagttctgtccaagc

SEQ ID NO: 14253 - DNA, 18 bp, synthetic construct
  misc_feature 1..18: note = Description of Artificial Sequence: Synthetic Antisense oligonucleotide
  modified_base 1..2: mod_base = OTHER; note = bicyclic nucleic acid (BNA)
  modified_base 6: mod_base = OTHER; note = bicyclic nucleic acid (BNA)
  modified_base 14: mod_base = OTHER; note = bicyclic nucleic acid (BNA)
  source 1..18: mol_type = other DNA
ggtaagttctgtccaagc

SEQ ID NO: 14254 - DNA, 18 bp, synthetic construct
  misc_feature 1..18: note = Description of Artificial Sequence: Synthetic Antisense oligonucleotide
  modified_base 1..2: mod_base = OTHER; note = bicyclic nucleic acid (BNA)
  modified_base 14: mod_base = OTHER; note = bicyclic nucleic acid (BNA)
  modified_base 17: mod_base = OTHER; note = bicyclic nucleic acid (BNA)
  source 1..18: mol_type = other DNA
ggtaagttctgtccaagc

SEQ ID NO: 14255 - DNA, 18 bp, synthetic construct
  misc_feature 1..18: note = Description of Artificial Sequence: Synthetic Antisense oligonucleotide
  modified_base 1..2: mod_base = OTHER; note = bicyclic nucleic acid (BNA)
  modified_base 9: mod_base = OTHER; note = bicyclic nucleic acid (BNA)
  modified_base 11: mod_base = OTHER; note = bicyclic nucleic acid (BNA)
  source 1..18: mol_type = other DNA
ggtaagttctgtccaagc

SEQ ID NO: 14256 - DNA, 18 bp, synthetic construct
  misc_feature 1..18: note = Description of Artificial Sequence: Synthetic Antisense oligonucleotide
  modified_base 1..2: mod_base = OTHER; note = bicyclic nucleic acid (BNA)
  modified_base 11: mod_base = OTHER; note = bicyclic nucleic acid (BNA)
  modified_base 13: mod_base = OTHER; note = bicyclic nucleic acid (BNA)
  source 1..18: mol_type = other DNA
ggtaagttctgtccaagc

SEQ ID NO: 14257 - DNA, 18 bp, synthetic construct
  misc_feature 1..18: note = Description of Artificial Sequence: Synthetic Antisense oligonucleotide
  modified_base 1..2: mod_base = OTHER; note = bicyclic nucleic acid (BNA)
  modified_base 13: mod_base = OTHER; note = bicyclic nucleic acid (BNA)
  modified_base 17: mod_base = OTHER; note = bicyclic nucleic acid (BNA)
  source 1..18: mol_type = other DNA
ggtaagttctgtccaagc

SEQ ID NO: 14258 - DNA, 18 bp, synthetic construct
  misc_feature 1..18: note = Description of Artificial Sequence: Synthetic Antisense oligonucleotide
  modified_base 1..2: mod_base = OTHER; note = bicyclic nucleic acid (BNA)
  modified_base 9: mod_base = OTHER; note = bicyclic nucleic acid (BNA)
  modified_base 17: mod_base = OTHER; note = bicyclic nucleic acid (BNA)
  source 1..18: mol_type = other DNA
ggtaagttctgtccaagc

SEQ ID NO: 14259 - DNA, 18 bp, synthetic construct
  misc_feature 1..18: note = Description of Artificial Sequence: Synthetic Antisense oligonucleotide
  modified_base 1..2: mod_base = OTHER; note = bicyclic nucleic acid (BNA)
  modified_base 6: mod_base = OTHER; note = bicyclic nucleic acid (BNA)
  modified_base 9: mod_base = OTHER; note = bicyclic nucleic acid (BNA)
  source 1..18: mol_type = other DNA
ggtaagttctgtccaagc

SEQ ID NO: 14260 - DNA, 18 bp, synthetic construct
  misc_feature 1..18: note = Description of Artificial Sequence: Synthetic Antisense oligonucleotide
  modified_base 1..2: mod_base = OTHER; note = bicyclic nucleic acid (BNA)
  modified_base 12: mod_base = OTHER; note = bicyclic nucleic acid (BNA)
  modified_base 17: mod_base = OTHER; note = bicyclic nucleic acid (BNA)
  source 1..18: mol_type = other DNA
gtaagttctgtccaagcc

SEQ ID NO: 14261 - DNA, 18 bp, synthetic construct
  misc_feature 1..18: note = Description of Artificial Sequence: Synthetic Antisense oligonucleotide
  modified_base 1..2: mod_base = OTHER; note = bicyclic nucleic acid (BNA)
  modified_base 5: mod_base = OTHER; note = bicyclic nucleic acid (BNA)
  modified_base 8: mod_base = OTHER; note = bicyclic nucleic acid (BNA)
  source 1..18: mol_type = other DNA
gtaagttctgtccaagcc

SEQ ID NO: 14262 - DNA, 18 bp, synthetic construct
  misc_feature 1..18: note = Description of Artificial Sequence: Synthetic Antisense oligonucleotide
  modified_base 1..2: mod_base = OTHER; note = bicyclic nucleic acid (BNA)
  modified_base 8: mod_base = OTHER; note = bicyclic nucleic acid (BNA)
  modified_base 13: mod_base = OTHER; note = bicyclic nucleic acid (BNA)
  source 1..18: mol_type = other DNA
gtaagttctgtccaagcc

SEQ ID NO: 14263 - DNA, 18 bp, synthetic construct
  misc_feature 1..18: note = Description of Artificial Sequence: Synthetic Antisense oligonucleotide
  modified_base 1..2: mod_base = OTHER; note = bicyclic nucleic acid (BNA)
  modified_base 5: mod_base = OTHER; note = bicyclic nucleic acid (BNA)
  modified_base 13: mod_base = OTHER; note = bicyclic nucleic acid (BNA)
  source 1..18: mol_type = other DNA
gtaagttctgtccaagcc

SEQ ID NO: 14264 - DNA, 18 bp, synthetic construct
  misc_feature 1..18: note = Description of Artificial Sequence: Synthetic Antisense oligonucleotide
  modified_base 1..2: mod_base = OTHER; note = bicyclic nucleic acid (BNA)
  modified_base 8: mod_base = OTHER; note = bicyclic nucleic acid (BNA)
  modified_base 17: mod_base = OTHER; note = bicyclic nucleic acid (BNA)
  source 1..18: mol_type = other DNA
gtaagttctgtccaagcc

SEQ ID NO: 14265 - DNA, 18 bp, synthetic construct
  misc_feature 1..18: note = Description of Artificial Sequence: Synthetic Antisense oligonucleotide
  modified_base 1..2: mod_base = OTHER; note = bicyclic nucleic acid (BNA)
  modified_base 13: mod_base = OTHER; note = bicyclic nucleic acid (BNA)
  modified_base 17: mod_base = OTHER; note = bicyclic nucleic acid (BNA)
  source 1..18: mol_type = other DNA
gtaagttctgtccaagcc

SEQ ID NO: 14266 - DNA, 18 bp, synthetic construct
  misc_feature 1..18: note = Description of Artificial Sequence: Synthetic Antisense oligonucleotide
  modified_base 1..2: mod_base = OTHER; note = bicyclic nucleic acid (BNA)
  modified_base 8: mod_base = OTHER; note = bicyclic nucleic acid (BNA)
  modified_base 12: mod_base = OTHER; note = bicyclic nucleic acid (BNA)
  source 1..18: mol_type = other DNA
gtaagttctgtccaagcc

SEQ ID NO: 14267 - DNA, 18 bp, synthetic construct
  misc_feature 1..18: note = Description of Artificial Sequence: Synthetic Antisense oligonucleotide
  modified_base 1..2: mod_base = OTHER; note = bicyclic nucleic acid (BNA)
  modified_base 5: mod_base = OTHER; note = bicyclic nucleic acid (BNA)
  modified_base 10: mod_base = OTHER; note = bicyclic nucleic acid (BNA)
  source 1..18: mol_type = other DNA
gtaagttctgtccaagcc

SEQ ID NO: 14268 - DNA, 18 bp, synthetic construct
  misc_feature 1..18: note = Description of Artificial Sequence: Synthetic Antisense oligonucleotide
  modified_base 1..2: mod_base = OTHER; note = bicyclic nucleic acid (BNA)
  modified_base 8: mod_base = OTHER; note = bicyclic nucleic acid (BNA)
  modified_base 16: mod_base = OTHER; note = bicyclic nucleic acid (BNA)
  source 1..18: mol_type = other DNA
gtaagttctgtccaagcc

SEQ ID NO: 14269 - DNA, 18 bp, synthetic construct
  misc_feature 1..18: note = Description of Artificial Sequence: Synthetic Antisense oligonucleotide
  modified_base 1..2: mod_base = OTHER; note = bicyclic nucleic acid (BNA)
  modified_base 10: mod_base = OTHER; note = bicyclic nucleic acid (BNA)
  modified_base 16: mod_base = OTHER; note = bicyclic nucleic acid (BNA)
  source 1..18: mol_type = other DNA
gtaagttctgtccaagcc

SEQ ID NO: 14270 - DNA, 18 bp, synthetic construct
  misc_feature 1..18: note = Description of Artificial Sequence: Synthetic Antisense oligonucleotide
  modified_base 1..2: mod_base = OTHER; note = bicyclic nucleic acid (BNA)
  modified_base 10: mod_base = OTHER; note = bicyclic nucleic acid (BNA)
  modified_base 12: mod_base = OTHER; note = bicyclic nucleic acid (BNA)
  source 1..18: mol_type = other DNA
gtaagttctgtccaagcc

SEQ ID NO: 14271 - DNA, 18 bp, synthetic construct
  misc_feature 1..18: note = Description of Artificial Sequence: Synthetic Antisense oligonucleotide
  modified_base 1..2: mod_base = OTHER; note = bicyclic nucleic acid (BNA)
  modified_base 5: mod_base = OTHER; note = bicyclic nucleic acid (BNA)
  modified_base 17: mod_base = OTHER; note = bicyclic nucleic acid (BNA)
  source 1..18: mol_type = other DNA
gtaagttctgtccaagcc

SEQ ID NO: 14272 - DNA, 18 bp, synthetic construct
  misc_feature 1..18: note = Description of Artificial Sequence: Synthetic Antisense oligonucleotide
  modified_base 1..2: mod_base = OTHER; note = bicyclic nucleic acid (BNA)
  modified_base 10: mod_base = OTHER; note = bicyclic nucleic acid (BNA)
  modified_base 17: mod_base = OTHER; note = bicyclic nucleic acid (BNA)
  source 1..18: mol_type = other DNA
gtaagttctgtccaagcc

SEQ ID NO: 14273 - DNA, 18 bp, synthetic construct
  misc_feature 1..18: note = Description of Artificial Sequence: Synthetic Antisense oligonucleotide
  modified_base 1..2: mod_base = OTHER; note = bicyclic nucleic acid (BNA)
  modified_base 12..13: mod_base = OTHER; note = bicyclic nucleic acid (BNA)
  source 1..18: mol_type = other DNA
gtaagttctgtccaagcc

SEQ ID NO: 14274 - DNA, 18 bp, synthetic construct
  misc_feature 1..18: note = Description of Artificial Sequence: Synthetic Antisense oligonucleotide
  modified_base 1..2: mod_base = OTHER; note = bicyclic nucleic acid (BNA)
  modified_base 5: mod_base = OTHER; note = bicyclic nucleic acid (BNA)
  modified_base 12: mod_base = OTHER; note = bicyclic nucleic acid (BNA)
  source 1..18: mol_type = other DNA
gtaagttctgtccaagcc

SEQ ID NO: 14275 - DNA, 18 bp, synthetic construct
  misc_feature 1..18: note = Description of Artificial Sequence: Synthetic Antisense oligonucleotide
  modified_base 1..2: mod_base = OTHER; note = bicyclic nucleic acid (BNA)
  modified_base 8: mod_base = OTHER; note = bicyclic nucleic acid (BNA)
  modified_base 10: mod_base = OTHER; note = bicyclic nucleic acid (BNA)
  source 1..18: mol_type = other DNA
gtaagttctgtccaagcc

SEQ ID NO: 14276 - DNA, 18 bp, synthetic construct
  misc_feature 1..18: note = Description of Artificial Sequence: Synthetic Antisense oligonucleotide
  modified_base 1..2: mod_base = OTHER; note = bicyclic nucleic acid (BNA)
  modified_base 13: mod_base = OTHER; note = bicyclic nucleic acid (BNA)
  modified_base 16: mod_base = OTHER; note = bicyclic nucleic acid (BNA)
  source 1..18: mol_type = other DNA
gtaagttctgtccaagcc

SEQ ID NO: 14277 - DNA, 18 bp, synthetic construct
  misc_feature 1..18: note = Description of Artificial Sequence: Synthetic Antisense oligonucleotide
  modified_base 1..2: mod_base = OTHER; note = bicyclic nucleic acid (BNA)
  modified_base 5: mod_base = OTHER; note = bicyclic nucleic acid (BNA)
  modified_base 16: mod_base = OTHER; note = bicyclic nucleic acid (BNA)
  source 1..18: mol_type = other DNA
gtaagttctgtccaagcc

SEQ ID NO: 14278 - DNA, 18 bp, synthetic construct
  misc_feature 1..18: note = Description of Artificial Sequence: Synthetic Antisense oligonucleotide
  modified_base 1..2: mod_base = OTHER; note = bicyclic nucleic acid (BNA)
  modified_base 12: mod_base = OTHER; note = bicyclic nucleic acid (BNA)
  modified_base 16: mod_base = OTHER; note = bicyclic nucleic acid (BNA)
  source 1..18: mol_type = other DNA
gtaagttctgtccaagcc

SEQ ID NO: 14279 - DNA, 18 bp, synthetic construct
  misc_feature 1..18: note = Description of Artificial Sequence: Synthetic Antisense oligonucleotide
  modified_base 1..2: mod_base = OTHER; note = bicyclic nucleic acid (BNA)
  modified_base 16..17: mod_base = OTHER; note = bicyclic nucleic acid (BNA)
  source 1..18: mol_type = other DNA
gtaagttctgtccaagcc

SEQ ID NO: 14280 - DNA, 18 bp, synthetic construct
  misc_feature 1..18: note = Description of Artificial Sequence: Synthetic Antisense oligonucleotide
  modified_base 1..2: mod_base = OTHER; note = bicyclic nucleic acid (BNA)
  modified_base 10: mod_base = OTHER; note = bicyclic nucleic acid (BNA)
  modified_base 13: mod_base = OTHER; note = bicyclic nucleic acid (BNA)
  source 1..18: mol_type = other DNA
gtaagttctgtccaagcc

SEQ ID NO: 14281 - DNA, 18 bp, synthetic construct
  misc_feature 1..18: note = Description of Artificial Sequence: Synthetic Antisense oligonucleotide
  modified_base 1..2: mod_base = OTHER; note = bicyclic nucleic acid (BNA)
  modified_base 6: mod_base = OTHER; note = bicyclic nucleic acid (BNA)
  modified_base 10: mod_base = OTHER; note = bicyclic nucleic acid (BNA)
  source 1..18: mol_type = other DNA
agtcggtaagttctgtcc

SEQ ID NO: 14282 - DNA, 18 bp, synthetic construct
  misc_feature 1..18: note = Description of Artificial Sequence: Synthetic Antisense oligonucleotide
  modified_base 1..2: mod_base = OTHER; note = bicyclic nucleic acid (BNA)
  modified_base 5: mod_base = OTHER; note = bicyclic nucleic acid (BNA)
  modified_base 13: mod_base = OTHER; note = bicyclic nucleic acid (BNA)
  source 1..18: mol_type = other DNA
agtcggtaagttctgtcc

SEQ ID NO: 14283 - DNA, 18 bp, synthetic construct
  misc_feature 1..18: note = Description of Artificial Sequence: Synthetic Antisense oligonucleotide
  modified_base 1..2: mod_base = OTHER; note = bicyclic nucleic acid (BNA)
  modified_base 13: mod_base = OTHER; note = bicyclic nucleic acid (BNA)
  modified_base 17: mod_base = OTHER; note = bicyclic nucleic acid (BNA)
  source 1..18: mol_type = other DNA
agtcggtaagttctgtcc

SEQ ID NO: 14284 - DNA, 18 bp, synthetic construct
  misc_feature 1..18: note = Description of Artificial Sequence: Synthetic Antisense oligonucleotide
  modified_base 1..2: mod_base = OTHER; note = bicyclic nucleic acid (BNA)
  modified_base 4: mod_base = OTHER; note = bicyclic nucleic acid (BNA)
  modified_base 15: mod_base = OTHER; note = bicyclic nucleic acid (BNA)
  source 1..18: mol_type = other DNA
agtcggtaagttctgtcc

SEQ ID NO: 14285 - DNA, 18 bp, synthetic construct
  misc_feature 1..18: note = Description of Artificial Sequence: Synthetic Antisense oligonucleotide
  modified_base 1..2: mod_base = OTHER; note = bicyclic nucleic acid (BNA)
  modified_base 5: mod_base = OTHER; note = bicyclic nucleic acid (BNA)
  modified_base 10: mod_base = OTHER; note = bicyclic nucleic acid (BNA)
  source 1..18: mol_type = other DNA
agtcggtaagttctgtcc

SEQ ID NO: 14286 - DNA, 18 bp, synthetic construct
  misc_feature 1..18: note = Description of Artificial Sequence: Synthetic Antisense oligonucleotide
  modified_base 1..2: mod_base = OTHER; note = bicyclic nucleic acid (BNA)
  modified_base 6: mod_base = OTHER; note = bicyclic nucleic acid (BNA)
  modified_base 13: mod_base = OTHER; note = bicyclic nucleic acid (BNA)
  source 1..18: mol_type = other DNA
agtcggtaagttctgtcc

SEQ ID NO: 14287 - DNA, 18 bp, synthetic construct
  misc_feature 1..18: note = Description of Artificial Sequence: Synthetic Antisense oligonucleotide
  modified_base 1..2: mod_base = OTHER; note = bicyclic nucleic acid (BNA)
  modified_base 4: mod_base = OTHER; note = bicyclic nucleic acid (BNA)
  modified_base 17: mod_base = OTHER; note = bicyclic nucleic acid (BNA)
  source 1..18: mol_type = other DNA
agtcggtaagttctgtcc

SEQ ID NO: 14288 - DNA, 18 bp, synthetic construct
  misc_feature 1..18: note = Description of Artificial Sequence: Synthetic Antisense oligonucleotide
  modified_base 1..2: mod_base = OTHER; note = bicyclic nucleic acid (BNA)
  modified_base 10: mod_base = OTHER; note = bicyclic nucleic acid (BNA)
  modified_base 15: mod_base = OTHER; note = bicyclic nucleic acid (BNA)
  source 1..18: mol_type = other DNA
agtcggtaagttctgtcc

SEQ ID NO: 14289 - DNA, 18 bp, synthetic construct
  misc_feature 1..18: note = Description of Artificial Sequence: Synthetic Antisense oligonucleotide
  modified_base 1..2: mod_base = OTHER; note = bicyclic nucleic acid (BNA)
  modified_base 13: mod_base = OTHER; note = bicyclic nucleic acid (BNA)
  modified_base 15: mod_base = OTHER; note = bicyclic nucleic acid (BNA)
  source 1..18: mol_type = other DNA
agtcggtaagttctgtcc

SEQ ID NO: 14290 - DNA, 18 bp, synthetic construct
  misc_feature 1..18: note = Description of Artificial Sequence: Synthetic Antisense oligonucleotide
  modified_base 1..2: mod_base = OTHER; note = bicyclic nucleic acid (BNA)
  modified_base 5..6: mod_base = OTHER; note = bicyclic nucleic acid (BNA)
  source 1..18: mol_type = other DNA
agtcggtaagttctgtcc

SEQ ID NO: 14291 - DNA, 18 bp, synthetic construct
  misc_feature 1..18: note = Description of Artificial Sequence: Synthetic Antisense oligonucleotide
  modified_base 1..2: mod_base = OTHER; note = bicyclic nucleic acid (BNA)
  modified_base 5: mod_base = OTHER; note = bicyclic nucleic acid (BNA)
  modified_base 15: mod_base = OTHER; note = bicyclic nucleic acid (BNA)
  source 1..18: mol_type = other DNA
agtcggtaagttctgtcc

SEQ ID NO: 14292 - DNA, 18 bp, synthetic construct
  misc_feature 1..18: note = Description of Artificial Sequence: Synthetic Antisense oligonucleotide
  modified_base 1..2: mod_base = OTHER; note = bicyclic nucleic acid (BNA)
  modified_base 5: mod_base = OTHER; note = bicyclic nucleic acid (BNA)
  modified_base 17: mod_base = OTHER; note = bicyclic nucleic acid (BNA)
  source 1..18: mol_type = other DNA
agtcggtaagttctgtcc

SEQ ID NO: 14293 - DNA, 18 bp, synthetic construct
  misc_feature 1..18: note = Description of Artificial Sequence: Synthetic Antisense oligonucleotide
  modified_base 1..2: mod_base = OTHER; note = bicyclic nucleic acid (BNA)
  modified_base 10: mod_base = OTHER; note = bicyclic nucleic acid (BNA)
  modified_base 17: mod_base = OTHER; note = bicyclic nucleic acid (BNA)
  source 1..18: mol_type = other DNA
agtcggtaagttctgtcc

SEQ ID NO: 14294 - DNA, 18 bp, synthetic construct
  misc_feature 1..18: note = Description of Artificial Sequence: Synthetic Antisense oligonucleotide
  modified_base 1..2: mod_base = OTHER; note = bicyclic nucleic acid (BNA)
  modified_base 4: mod_base = OTHER; note = bicyclic nucleic acid (BNA)
  modified_base 10: mod_base = OTHER; note = bicyclic nucleic acid (BNA)
  source 1..18: mol_type = other DNA
agtcggtaagttctgtcc

SEQ ID NO: 14295 - DNA, 18 bp, synthetic construct
  misc_feature 1..18: note = Description of Artificial Sequence: Synthetic Antisense oligonucleotide
  modified_base 1..2: mod_base = OTHER; note = bicyclic nucleic acid (BNA)
  modified_base 4: mod_base = OTHER; note = bicyclic nucleic acid (BNA)
  modified_base 6: mod_base = OTHER; note = bicyclic nucleic acid (BNA)
  source 1..18: mol_type = other DNA
agtcggtaagttctgtcc

SEQ ID NO: 14296 - DNA, 18 bp, synthetic construct
  misc_feature 1..18: note = Description of Artificial Sequence: Synthetic Antisense oligonucleotide
  modified_base 1..2: mod_base = OTHER; note = bicyclic nucleic acid (BNA)
  modified_base 4: mod_base = OTHER; note = bicyclic nucleic acid (BNA)
  modified_base 13: mod_base = OTHER; note = bicyclic nucleic acid (BNA)
  source 1..18: mol_type = other DNA
agtcggtaagttctgtcc

SEQ ID NO: 14297 - DNA, 18 bp, synthetic construct
  misc_feature 1..18: note = Description of Artificial Sequence: Synthetic Antisense oligonucleotide
  modified_base 1..2: mod_base = OTHER; note = bicyclic nucleic acid (BNA)
  modified_base 15: mod_base = OTHER; note = bicyclic nucleic acid (BNA)
  modified_base 17: mod_base = OTHER; note = bicyclic nucleic acid (BNA)
  source 1..18: mol_type = other DNA
agtcggtaagttctgtcc

SEQ ID NO: 14298 - DNA, 18 bp, synthetic construct
  misc_feature 1..18: note = Description of Artificial Sequence: Synthetic Antisense oligonucleotide
  modified_base 1..2: mod_base = OTHER; note = bicyclic nucleic acid (BNA)
  modified_base 6: mod_base = OTHER; note = bicyclic nucleic acid (BNA)
  modified_base 17: mod_base = OTHER; note = bicyclic nucleic acid (BNA)
  source 1..18: mol_type = other DNA
agtcggtaagttctgtcc

SEQ ID NO: 14299 - DNA, 18 bp, synthetic construct
  misc_feature 1..18: note = Description of Artificial Sequence: Synthetic Antisense oligonucleotide
  modified_base 1..2: mod_base = OTHER; note = bicyclic nucleic acid (BNA)
  modified_base 6: mod_base = OTHER; note = bicyclic nucleic acid (BNA)
  modified_base 15: mod_base = OTHER; note = bicyclic nucleic acid (BNA)
  source 1..18: mol_type = other DNA
agtcggtaagttctgtcc

SEQ ID NO: 14300 - DNA, 18 bp, synthetic construct
  misc_feature 1..18: note = Description of Artificial Sequence: Synthetic Antisense oligonucleotide
  modified_base 1..2: mod_base = OTHER; note = bicyclic nucleic acid (BNA)
  modified_base 4..5: mod_base = OTHER; note = bicyclic nucleic acid (BNA)
  source 1..18: mol_type = other DNA
agtcggtaagttctgtcc

SEQ ID NO: 14301 - DNA, 18 bp, synthetic construct
  misc_feature 1..18: note = Description of Artificial Sequence: Synthetic Antisense oligonucleotide
  modified_base 1..2: mod_base = OTHER; note = bicyclic nucleic acid (BNA)
  modified_base 10: mod_base = OTHER; note = bicyclic nucleic acid (BNA)
  modified_base 13: mod_base = OTHER; note = bicyclic nucleic acid (BNA)
  source 1..18: mol_type = other DNA
agtcggtaagttctgtcc

SEQ ID NO: 14302 - DNA, 18 bp, synthetic construct
  misc_feature 1..18: note = Description of Artificial Sequence: Synthetic Antisense oligonucleotide
  modified_base 1..2: mod_base = OTHER; note = bicyclic nucleic acid (BNA)
  modified_base 12: mod_base = OTHER; note = bicyclic nucleic acid (BNA)
  modified_base 17: mod_base = OTHER; note = bicyclic nucleic acid (BNA)
  source 1..18: mol_type = other DNA
ctgtccaagcccggttga

SEQ ID NO: 14303 - DNA, 18 bp, synthetic construct
  misc_feature 1..18: note = Description of Artificial Sequence: Synthetic Antisense oligonucleotide
  modified_base 1..2: mod_base = OTHER; note = bicyclic nucleic acid (BNA)
  modified_base 6: mod_base = OTHER; note = bicyclic nucleic acid (BNA)
  modified_base 10: mod_base = OTHER; note = bicyclic nucleic acid (BNA)
  source 1..18: mol_type = other DNA
ctgtccaagcccggttga

SEQ ID NO: 14304 - DNA, 18 bp, synthetic construct
  misc_feature 1..18: note = Description of Artificial Sequence: Synthetic Antisense oligonucleotide
  modified_base 1..2: mod_base = OTHER; note = bicyclic nucleic acid (BNA)
  modified_base 9: mod_base = OTHER; note = bicyclic nucleic acid (BNA)
  modified_base 14: mod_base = OTHER; note = bicyclic nucleic acid (BNA)
  source 1..18: mol_type = other DNA
ctgtccaagcccggttga

SEQ ID NO: 14305 - DNA, 18 bp, synthetic construct
  misc_feature 1..18: note = Description of Artificial Sequence: Synthetic Antisense oligonucleotide
  modified_base 1..2: mod_base = OTHER; note = bicyclic nucleic acid (BNA)
  modified_base 11..12: mod_base = OTHER; note = bicyclic nucleic acid (BNA)
  source 1..18: mol_type = other DNA
ctgtccaagcccggttga

SEQ ID NO: 14306 - DNA, 18 bp, synthetic construct
  misc_feature 1..18: note = Description of Artificial Sequence: Synthetic Antisense oligonucleotide
  modified_base 1..2: mod_base = OTHER; note = bicyclic nucleic acid (BNA)
  modified_base 5: mod_base = OTHER; note = bicyclic nucleic acid (BNA)
  modified_base 9: mod_base = OTHER; note = bicyclic nucleic acid (BNA)
  source 1..18: mol_type = other DNA
ctgtccaagcccggttga

SEQ ID NO: 14307 - DNA, 18 bp, synthetic construct
  misc_feature 1..18: note = Description of Artificial Sequence: Synthetic Antisense oligonucleotide
  modified_base 1..3: mod_base = OTHER; note = bicyclic nucleic acid (BNA)
  modified_base 9: mod_base = OTHER; note = bicyclic nucleic acid (BNA)
  source 1..18: mol_type = other DNA
ctgtccaagcccggttga

SEQ ID NO: 14308 - DNA, 18 bp, synthetic construct
  misc_feature 1..18: note = Description of Artificial Sequence: Synthetic Antisense oligonucleotide
  modified_base 1..2: mod_base = OTHER; note = bicyclic nucleic acid (BNA)
  modified_base 6: mod_base = OTHER; note = bicyclic nucleic acid (BNA)
  modified_base 14: mod_base = OTHER; note = bicyclic nucleic acid (BNA)
  source 1..18: mol_type = other DNA
ctgtccaagcccggttga

SEQ ID NO: 14309 - DNA, 18 bp, synthetic construct
  misc_feature 1..18: note = Description of Artificial Sequence: Synthetic Antisense oligonucleotide
  modified_base 1..2: mod_base = OTHER; note = bicyclic nucleic acid (BNA)
  modified_base 9..10: mod_base = OTHER; note = bicyclic nucleic acid (BNA)
  source 1..18: mol_type = other DNA
ctgtccaagcccggttga

SEQ ID NO: 14310 - DNA, 18 bp, synthetic construct
  misc_feature 1..18: note = Description of Artificial Sequence: Synthetic Antisense oligonucleotide
  modified_base 1..2: mod_base = OTHER; note = bicyclic nucleic acid (BNA)
  modified_base 5: mod_base = OTHER; note = bicyclic nucleic acid (BNA)
  modified_base 13: mod_base = OTHER; note = bicyclic nucleic acid (BNA)
  source 1..18: mol_type = other DNA
ctgtccaagcccggttga

SEQ ID NO: 14311 - DNA, 18 bp, synthetic construct
  misc_feature 1..18: note = Description of Artificial Sequence: Synthetic Antisense oligonucleotide
  modified_base 1..3: mod_base = OTHER; note = bicyclic nucleic acid (BNA)
  modified_base 13: mod_base = OTHER; note = bicyclic nucleic acid (BNA)
  source 1..18: mol_type = other DNA
ctgtccaagcccggttga

SEQ ID NO: 14312 - DNA, 18 bp, synthetic construct
  misc_feature 1..18: note = Description of Artificial Sequence: Synthetic Antisense oligonucleotide
  modified_base 1..2: mod_base = OTHER; note = bicyclic nucleic acid (BNA)
  modified_base 13: mod_base = OTHER; note = bicyclic nucleic acid (BNA)
  modified_base 17: mod_base = OTHER; note = bicyclic nucleic acid (BNA)
  source 1..18: mol_type = other DNA
ctgtccaagcccggttga

SEQ ID NO: 14313 - DNA, 18 bp, synthetic construct
  misc_feature 1..18: note = Description of Artificial Sequence: Synthetic Antisense oligonucleotide
  modified_base 1..3: mod_base = OTHER; note = bicyclic nucleic acid (BNA)
  modified_base 6: mod_base = OTHER; note = bicyclic nucleic acid (BNA)
  source 1..18: mol_type = other DNA
ctgtccaagcccggttga

SEQ ID NO: 14314 - DNA, 18 bp, synthetic construct
  misc_feature 1..18: note = Description of Artificial Sequence: Synthetic Antisense oligonucleotide
  modified_base 1..2: mod_base = OTHER; note = bicyclic nucleic acid (BNA)
  modified_base 6: mod_base = OTHER; note = bicyclic nucleic acid (BNA)
  modified_base 9: mod_base = OTHER; note = bicyclic nucleic acid (BNA)
  source 1..18: mol_type = other DNA
ctgtccaagcccggttga

SEQ ID NO: 14315 - DNA, 18 bp, synthetic construct
  misc_feature 1..18: note = Description of Artificial Sequence: Synthetic Antisense oligonucleotide
  modified_base 1..2: mod_base = OTHER; note = bicyclic nucleic acid (BNA)
  modified_base 5: mod_base = OTHER; note = bicyclic nucleic acid (BNA)
  modified_base 10: mod_base = OTHER; note = bicyclic nucleic acid (BNA)
  source 1..18: mol_type = other DNA
ctgtccaagcccggttga

SEQ ID NO: 14316 - DNA, 18 bp, synthetic construct
  misc_feature 1..18: note = Description of Artificial Sequence: Synthetic Antisense oligonucleotide
  modified_base 1..3: mod_base = OTHER; note = bicyclic nucleic acid (BNA)
  modified_base 10: mod_base = OTHER; note = bicyclic nucleic acid (BNA)
  source 1..18: mol_type = other DNA
ctgtccaagcccggttga

SEQ ID NO: 14317 - DNA, 18 bp, synthetic construct
  misc_feature 1..18: note = Description of Artificial Sequence: Synthetic Antisense oligonucleotide
  modified_base 1..2: mod_base = OTHER; note = bicyclic nucleic acid (BNA)
  modified_base 13..14: mod_base = OTHER; note = bicyclic nucleic acid (BNA)
  source 1..18: mol_type = other DNA
ctgtccaagcccggttga

SEQ ID NO: 14318 - DNA, 18 bp, synthetic construct
  misc_feature 1..18: note = Description of Artificial Sequence: Synthetic Antisense oligonucleotide
  modified_base 1..2: mod_base = OTHER; note = bicyclic nucleic acid (BNA)
  modified_base 6: mod_base = OTHER; note = bicyclic nucleic acid (BNA)
  modified_base 13: mod_base = OTHER; note = bicyclic nucleic acid (BNA)
  source 1..18: mol_type = other DNA
ctgtccaagcccggttga

SEQ ID NO: 14319 - DNA, 18 bp, synthetic construct
  misc_feature 1..18: note = Description of Artificial Sequence: Synthetic Antisense oligonucleotide
  modified_base 1..2: mod_base = OTHER; note = bicyclic nucleic acid (BNA)
  modified_base 9: mod_base = OTHER; note = bicyclic nucleic acid (BNA)
  modified_base 11: mod_base = OTHER; note = bicyclic nucleic acid (BNA)
  source 1..18: mol_type = other DNA
ctgtccaagcccggttga

SEQ ID NO: 14320 - DNA, 18 bp, synthetic construct
  misc_feature 1..18: note = Description of Artificial Sequence: Synthetic Antisense oligonucleotide
  modified_base 1..2: mod_base = OTHER; note = bicyclic nucleic acid (BNA)
  modified_base 14: mod_base = OTHER; note = bicyclic nucleic acid (BNA)
  modified_base 17: mod_base = OTHER; note = bicyclic nucleic acid (BNA)
  source 1..18: mol_type = other DNA
ctgtccaagcccggttga

SEQ ID NO: 14321 - DNA, 18 bp, synthetic construct
  misc_feature 1..18: note = Description of Artificial Sequence: Synthetic Antisense oligonucleotide
  modified_base 1..2: mod_base = OTHER; note = bicyclic nucleic acid (BNA)
  modified_base 11: mod_base = OTHER; note = bicyclic nucleic acid (BNA)
  modified_base 13: mod_base = OTHER; note = bicyclic nucleic acid (BNA)
  source 1..18: mol_type = other DNA
ctgtccaagcccggttga

SEQ ID NO: 14322 - DNA, 18 bp, synthetic construct
  misc_feature 1..18: note = Description of Artificial Sequence: Synthetic Antisense oligonucleotide
  modified_base 1..2: mod_base = OTHER; note = bicyclic nucleic acid (BNA)
  modified_base 5: mod_base = OTHER; note = bicyclic nucleic acid (BNA)
  modified_base 14: mod_base = OTHER; note = bicyclic nucleic acid (BNA)
  source 1..18: mol_type = other DNA
ctgtccaagcccggttga

SEQ ID NO: 14323 - DNA, 18 bp, synthetic construct
  misc_feature 1..18: note = Description of Artificial Sequence: Synthetic Antisense oligonucleotide
  modified_base 1..3: mod_base = OTHER; note = bicyclic nucleic acid (BNA)
  modified_base 14: mod_base = OTHER; note = bicyclic nucleic acid (BNA)
  source 1..18: mol_type = other DNA
ctgtccaagcccggttga

SEQ ID NO: 14324 - DNA, 18 bp, synthetic construct
  misc_feature 1..18: note = Description of Artificial Sequence: Synthetic Antisense oligonucleotide
  modified_base 1..2: mod_base = OTHER; note = bicyclic nucleic acid (BNA)
  modified_base 10: mod_base = OTHER; note = bicyclic nucleic acid (BNA)
  modified_base 12: mod_base = OTHER; note = bicyclic nucleic acid (BNA)
  source 1..18: mol_type = other DNA
ctgtccaagcccggttga

SEQ ID NO: 14325 - DNA, 18 bp, synthetic construct
  misc_feature 1..18: note = Description of Artificial Sequence: Synthetic Antisense oligonucleotide
  modified_base 1..2: mod_base = OTHER; note = bicyclic nucleic acid (BNA)
  modified_base 9: mod_base = OTHER; note = bicyclic nucleic acid (BNA)
  modified_base 17: mod_base = OTHER; note = bicyclic nucleic acid (BNA)
  source 1..18: mol_type = other DNA
ctgtccaagcccggttga

SEQ ID NO: 14326 - DNA, 18 bp, synthetic construct
  misc_feature 1..18: note = Description of Artificial Sequence: Synthetic Antisense oligonucleotide
  modified_base 1..2: mod_base = OTHER; note = bicyclic nucleic acid (BNA)
  modified_base 12: mod_base = OTHER; note = bicyclic nucleic acid (BNA)
  modified_base 14: mod_base = OTHER; note = bicyclic nucleic acid (BNA)
  source 1..18: mol_type = other DNA
ctgtccaagcccggttga

SEQ ID NO: 14327 - DNA, 18 bp, synthetic construct
  misc_feature 1..18: note = Description of Artificial Sequence: Synthetic Antisense oligonucleotide
  modified_base 1..2: mod_base = OTHER; note = bicyclic nucleic acid (BNA)
  modified_base 5: mod_base = OTHER; note = bicyclic nucleic acid (BNA)
  modified_base 11: mod_base = OTHER; note = bicyclic nucleic acid (BNA)
  source 1..18: mol_type = other DNA
ctgtccaagcccggttga

SEQ ID NO: 14328 - DNA, 18 bp, synthetic construct
  misc_feature 1..18: note = Description of Artificial Sequence: Synthetic Antisense oligonucleotide
  modified_base 1..3: mod_base = OTHER; note = bicyclic nucleic acid (BNA)
  modified_base 17: mod_base = OTHER; note = bicyclic nucleic acid (BNA)
  source 1..18: mol_type = other DNA
ctgtccaagcccggttga

SEQ ID NO: 14329 - DNA, 18 bp, synthetic construct
  misc_feature 1..18: note = Description of Artificial Sequence: Synthetic Antisense oligonucleotide
  modified_base 1..2: mod_base = OTHER; note = bicyclic nucleic acid (BNA)
  modified_base 6: mod_base = OTHER; note = bicyclic nucleic acid (BNA)
  modified_base 12: mod_base = OTHER; note = bicyclic nucleic acid (BNA)
  source 1..18: mol_type = other DNA
ctgtccaagcccggttga

SEQ ID NO: 14330 - DNA, 18 bp, synthetic construct
  misc_feature 1..18: note = Description of Artificial Sequence: Synthetic Antisense oligonucleotide
  modified_base 1..2: mod_base = OTHER; note = bicyclic nucleic acid (BNA)
  modified_base 5..6: mod_base = OTHER; note = bicyclic nucleic acid (BNA)
  source 1..18: mol_type = other DNA
ctgtccaagcccggttga

SEQ ID NO: 14331 - DNA, 18 bp, synthetic construct
  misc_feature 1..18: note = Description of Artificial Sequence: Synthetic Antisense oligonucleotide
  modified_base 1..2: mod_base = OTHER; note = bicyclic nucleic acid (BNA)
  modified_base 11: mod_base = OTHER; note = bicyclic nucleic acid (BNA)
  modified_base 14: mod_base = OTHER; note = bicyclic nucleic acid (BNA)
  source 1..18: mol_type = other DNA
ctgtccaagcccggttga

SEQ ID NO: 14332 - DNA, 18 bp, synthetic construct
  misc_feature 1..18: note = Description of Artificial Sequence: Synthetic Antisense oligonucleotide
  modified_base 1..2: mod_base = OTHER; note = bicyclic nucleic acid (BNA)
  modified_base 9: mod_base = OTHER; note = bicyclic nucleic acid (BNA)
  modified_base 12: mod_base = OTHER; note = bicyclic nucleic acid (BNA)
  source 1..18: mol_type = other DNA
ctgtccaagcccggttga

SEQ ID NO: 14333 - DNA, 18 bp, synthetic construct
  misc_feature 1..18: note = Description of Artificial Sequence: Synthetic Antisense oligonucleotide
  modified_base 1..2: mod_base = OTHER; note = bicyclic nucleic acid (BNA)
  modified_base 5: mod_base = OTHER; note = bicyclic nucleic acid (BNA)
  modified_base 17: mod_base = OTHER; note = bicyclic nucleic acid (BNA)
  source 1..18: mol_type = other DNA
ctgtccaagcccggttga

SEQ ID NO: 14334 - DNA, 18 bp, synthetic construct
  misc_feature 1..18: note = Description of Artificial Sequence: Synthetic Antisense oligonucleotide
  modified_base 1..3: mod_base = OTHER; note = bicyclic nucleic acid (BNA)
  modified_base 11: mod_base = OTHER; note = bicyclic nucleic acid (BNA)
  source 1..18: mol_type = other DNA
ctgtccaagcccggttga

SEQ ID NO: 14335 - DNA, 18 bp, synthetic construct
  misc_feature 1..18: note = Description of Artificial Sequence: Synthetic Antisense oligonucleotide
  modified_base 1..2: mod_base = OTHER; note = bicyclic nucleic acid (BNA)
  modified_base 10..11: mod_base = OTHER; note = bicyclic nucleic acid (BNA)
  source 1..18: mol_type = other DNA
ctgtccaagcccggttga

SEQ ID NO: 14336 - DNA, 18 bp, synthetic construct
  misc_feature 1..18: note = Description of Artificial Sequence: Synthetic Antisense oligonucleotide
  modified_base 1..2: mod_base = OTHER; note = bicyclic nucleic acid (BNA)
  modified_base 10: mod_base = OTHER; note = bicyclic nucleic acid (BNA)
  modified_base 17: mod_base = OTHER; note = bicyclic nucleic acid (BNA)
  source 1..18: mol_type = other DNA
ctgtccaagcccggttga

SEQ ID NO: 14337 - DNA, 18 bp, synthetic construct
  misc_feature 1..18: note = Description of Artificial Sequence: Synthetic Antisense oligonucleotide
  modified_base 1..2: mod_base = OTHER; note = bicyclic nucleic acid (BNA)
  modified_base 12..13: mod_base = OTHER; note = bicyclic nucleic acid (BNA)
  source 1..18: mol_type = other DNA
ctgtccaagcccggttga

SEQ ID NO: 14338 - DNA, 18 bp, synthetic construct
  misc_feature 1..18: note = Description of Artificial Sequence: Synthetic Antisense oligonucleotide
  modified_base 1..2: mod_base = OTHER; note = bicyclic nucleic acid (BNA)
  modified_base 5: mod_base = OTHER; note = bicyclic nucleic acid (BNA)
  modified_base 12: mod_base = OTHER; note = bicyclic nucleic acid (BNA)
  source 1..18: mol_type = other DNA
ctgtccaagcccggttga

SEQ ID NO: 14339 - DNA, 18 bp, synthetic construct
  misc_feature 1..18: note = Description of Artificial Sequence: Synthetic Antisense oligonucleotide
  modified_base 1..2: mod_base = OTHER; note = bicyclic nucleic acid (BNA)
  modified_base 10: mod_base = OTHER; note = bicyclic nucleic acid (BNA)
  modified_base 14: mod_base = OTHER; note = bicyclic nucleic acid (BNA)
  source 1..18: mol_type = other DNA
ctgtccaagcccggttga

SEQ ID NO: 14340 - DNA, 18 bp, synthetic construct
  misc_feature 1..18: note = Description of Artificial Sequence: Synthetic Antisense oligonucleotide
  modified_base 1..2: mod_base = OTHER; note = bicyclic nucleic acid (BNA)
  modified_base 6: mod_base = OTHER; note = bicyclic nucleic acid (BNA)
  modified_base 11: mod_base = OTHER; note = bicyclic nucleic acid (BNA)
  source 1..18: mol_type = other DNA
ctgtccaagcccggttga

SEQ ID NO: 14341 - DNA, 18 bp, synthetic construct
  misc_feature 1..18: note = Description of Artificial Sequence: Synthetic Antisense oligonucleotide
  modified_base 1..2: mod_base = OTHER; note = bicyclic nucleic acid (BNA)
  modified_base 6: mod_base = OTHER; note = bicyclic nucleic acid (BNA)
  modified_base 17: mod_base = OTHER; note = bicyclic nucleic acid (BNA)
  source 1..18: mol_type = other DNA
ctgtccaagcccggttga

SEQ ID NO: 14342 - DNA, 18 bp, synthetic construct
  misc_feature 1..18: note = Description of Artificial Sequence: Synthetic Antisense oligonucleotide
  modified_base 1..2: mod_base = OTHER; note = bicyclic nucleic acid (BNA)
  modified_base 9: mod_base = OTHER; note = bicyclic nucleic acid (BNA)
  modified_base 13: mod_base = OTHER; note = bicyclic nucleic acid (BNA)
  source 1..18: mol_type = other DNA
ctgtccaagcccggttga

SEQ ID NO: 14343 - DNA, 18 bp, synthetic construct
  misc_feature 1..18: note = Description of Artificial Sequence: Synthetic Antisense oligonucleotide
  modified_base 1..2: mod_base = OTHER; note = bicyclic nucleic acid (BNA)
  modified_base 11: mod_base = OTHER; note = bicyclic nucleic acid (BNA)
  modified_base 17: mod_base = OTHER; note = bicyclic nucleic acid (BNA)
  source 1..18: mol_type = other DNA
ctgtccaagcccggttga

SEQ ID NO: 14344 - DNA, 18 bp, synthetic construct
  misc_feature 1..18: note = Description of Artificial Sequence: Synthetic Antisense oligonucleotide
  modified_base 1..3: mod_base = OTHER; note = bicyclic nucleic acid (BNA)
  modified_base 12: mod_base = OTHER; note = bicyclic nucleic acid (BNA)
  source 1..18: mol_type = other DNA
ctgtccaagcccggttga

SEQ ID NO: 14345 - DNA, 18 bp, synthetic construct
  misc_feature 1..18: note = Description of Artificial Sequence: Synthetic Antisense oligonucleotide
  modified_base 1..3: mod_base = OTHER; note = bicyclic nucleic acid (BNA)
  modified_base 5: mod_base = OTHER; note = bicyclic nucleic acid (BNA)
  source 1..18: mol_type = other DNA
ctgtccaagcccggttga

SEQ ID NO: 14346 - DNA, 18 bp, synthetic construct
  misc_feature 1..18: note = Description of Artificial Sequence: Synthetic Antisense oligonucleotide
  modified_base 1..2: mod_base = OTHER; note = bicyclic nucleic acid (BNA)
  modified_base 10: mod_base = OTHER; note = bicyclic nucleic acid (BNA)
  modified_base 13: mod_base = OTHER; note = bicyclic nucleic acid (BNA)
  source 1..18: mol_type = other DNA
ctgtccaagcccggttga

SEQ ID NO: 14347 - DNA, 20 bp, synthetic construct
  misc_feature 1..20: note = Description of Artificial Sequence: Synthetic Antisense oligonucleotide
  modified_base 1..2: mod_base = OTHER; note = bicyclic nucleic acid (BNA)
  modified_base 9: mod_base = OTHER; note = bicyclic nucleic acid (BNA)
  source 1..20: mol_type = other DNA
tcaaggaagatggcatttct

SEQ ID NO: 14348 - DNA, 20 bp, synthetic construct
  misc_feature 1..20: note = Description of Artificial Sequence: Synthetic Antisense oligonucleotide
  modified_base 1..2: mod_base = OTHER; note = bicyclic nucleic acid (BNA)
  modified_base 5: mod_base = OTHER; note = bicyclic nucleic acid (BNA)
  source 1..20: mol_type = other DNA
tcaaggaagatggcatttct

SEQ ID NO: 14349 - DNA, 20 bp, synthetic construct
  misc_feature 1..20: note = Description of Artificial Sequence: Synthetic Antisense oligonucleotide
  modified_base 1..2: mod_base = OTHER; note = bicyclic nucleic acid (BNA)
  modified_base 6: mod_base = OTHER; note = bicyclic nucleic acid (BNA)
  source 1..20: mol_type = other DNA
tcaaggaagatggcatttct

SEQ ID NO: 14350 - DNA, 20 bp, synthetic construct
  misc_feature 1..20: note = Description of Artificial Sequence: Synthetic Antisense oligonucleotide
  modified_base 1..2: mod_base = OTHER; note = bicyclic nucleic acid (BNA)
  modified_base 12: mod_base = OTHER; note = bicyclic nucleic acid (BNA)
  source 1..20: mol_type = other DNA
tcaaggaagatggcatttct

SEQ ID NO: 14351 - DNA, 20 bp, synthetic construct
  misc_feature 1..20: note = Description of Artificial Sequence: Synthetic Antisense oligonucleotide
  modified_base 1..2: mod_base = OTHER; note = bicyclic nucleic acid (BNA)
  modified_base 13: mod_base = OTHER; note = bicyclic nucleic acid (BNA)
  source 1..20: mol_type = other DNA
tcaaggaagatggcatttct

SEQ ID NO: 14352 - DNA, 20 bp, synthetic construct
  misc_feature 1..20: note = Description of Artificial Sequence: Synthetic Antisense oligonucleotide
  modified_base 1..2: mod_base = OTHER; note = bicyclic nucleic acid (BNA)
  modified_base 19: mod_base = OTHER; note = bicyclic nucleic acid (BNA)
  source 1..20: mol_type = other DNA
tcaaggaagatggcatttct

SEQ ID NO: 14353 - DNA, 20 bp, synthetic construct
  misc_feature 1..20: note = Description of Artificial Sequence: Synthetic Antisense oligonucleotide
  modified_base 1..2: mod_base = OTHER; note = bicyclic nucleic acid (BNA)
  modified_base 14: mod_base = OTHER; note = bicyclic nucleic acid (BNA)
  source 1..20: mol_type = other DNA
tcaaggaagatggcatttct

SEQ ID NO: 14354 - DNA, 22 bp, synthetic construct
  misc_feature 1..22: note = Description of Artificial Sequence: Synthetic Antisense oligonucleotide
  modified_base 1..2: mod_base = OTHER; note = bicyclic nucleic acid (BNA)
  modified_base 9: mod_base = OTHER; note = bicyclic nucleic acid (BNA)
  source 1..22: mol_type = other DNA
tcaaggaagatggcatttctag

SEQ ID NO: 14355 - DNA, 22 bp, synthetic construct
  misc_feature 1..22: note = Description of Artificial Sequence: Synthetic Antisense oligonucleotide
  modified_base 1..2: mod_base = OTHER; note = bicyclic nucleic acid (BNA)
  modified_base 5: mod_base = OTHER; note = bicyclic nucleic acid (BNA)
  source 1..22: mol_type = other DNA
tcaaggaagatggcatttctag

SEQ ID NO: 14356 - DNA, 22 bp, synthetic construct
  misc_feature 1..22: note = Description of Artificial Sequence: Synthetic Antisense oligonucleotide
  modified_base 1..2: mod_base = OTHER; note = bicyclic nucleic acid (BNA)
  modified_base 6: mod_base = OTHER; note = bicyclic nucleic acid (BNA)
  source 1..22: mol_type = other DNA
tcaaggaagatggcatttctag

SEQ ID NO: 14357 - DNA, 22 bp, synthetic construct
  misc_feature 1..22: note = Description of Artificial Sequence: Synthetic Antisense oligonucleotide
  modified_base 1..2: mod_base = OTHER; note = bicyclic nucleic acid (BNA)
  modified_base 12: mod_base = OTHER; note = bicyclic nucleic acid (BNA)
  source 1..22: mol_type = other DNA
tcaaggaagatggcatttctag

SEQ ID NO: 14358 - DNA, 22 bp, synthetic construct
  misc_feature 1..22: note = Description of Artificial Sequence: Synthetic Antisense oligonucleotide
  modified_base 1..2: mod_base = OTHER; note = bicyclic nucleic acid (BNA)
  modified_base 13: mod_base = OTHER; note = bicyclic nucleic acid (BNA)
  source 1..22: mol_type = other DNA
tcaaggaagatggcatttctag

SEQ ID NO: 14359 - DNA, 22 bp, synthetic construct
  misc_feature 1..22: note = Description of Artificial Sequence: Synthetic Antisense oligonucleotide
  modified_base 1..2: mod_base = OTHER; note = bicyclic nucleic acid (BNA)
  modified_base 19: mod_base = OTHER; note = bicyclic nucleic acid (BNA)
  source 1..22: mol_type = other DNA
tcaaggaagatggcatttctag

SEQ ID NO: 14360 - DNA, 22 bp, synthetic construct
  misc_feature 1..22: note = Description of Artificial Sequence: Synthetic Antisense oligonucleotide
  modified_base 1..2: mod_base = OTHER; note = bicyclic nucleic acid (BNA)
  modified_base 14: mod_base = OTHER; note = bicyclic nucleic acid (BNA)
  source 1..22: mol_type = other DNA
tcaaggaagatggcatttctag

SEQ ID NO: 14361 - DNA, 20 bp, synthetic construct
  misc_feature 1..20: note = Description of Artificial Sequence: Synthetic Antisense oligonucleotide
  modified_base 1..2: mod_base = OTHER; note = bicyclic nucleic acid (BNA)
  modified_base 9: mod_base = OTHER; note = bicyclic nucleic acid (BNA)
  modified_base 14: mod_base = OTHER; note = bicyclic nucleic acid (BNA)
  source 1..20: mol_type = other DNA
tcaaggaagatggcatttct

SEQ ID NO: 14362 - DNA, 20 bp, synthetic construct
  misc_feature 1..20: note = Description of Artificial Sequence: Synthetic Antisense oligonucleotide
  modified_base 1..2: mod_base = OTHER; note = bicyclic nucleic acid (BNA)
  modified_base 5: mod_base = OTHER; note = bicyclic nucleic acid (BNA)
  modified_base 9: mod_base = OTHER; note = bicyclic nucleic acid (BNA)
  source 1..20: mol_type = other DNA
tcaaggaagatggcatttct

SEQ ID NO: 14363 - DNA, 20 bp, synthetic construct
  misc_feature 1..20: note = Description of Artificial Sequence: Synthetic Antisense oligonucleotide
  modified_base 1..2: mod_base = OTHER; note = bicyclic nucleic acid (BNA)
  modified_base 5: mod_base = OTHER; note = bicyclic nucleic acid (BNA)
  modified_base 19: mod_base = OTHER; note = bicyclic nucleic acid (BNA)
  source 1..20: mol_type = other DNA
tcaaggaagatggcatttct

SEQ ID NO: 14364 - DNA, 20 bp, synthetic construct
  misc_feature 1..20: note = Description of Artificial Sequence: Synthetic Antisense oligonucleotide
  modified_base 1..2: mod_base = OTHER; note = bicyclic nucleic acid (BNA)
  modified_base 6: mod_base = OTHER; note = bicyclic nucleic acid (BNA)
  modified_base 14: mod_base = OTHER; note = bicyclic nucleic acid (BNA)
  source 1..20: mol_type = other DNA
tcaaggaagatggcatttct

SEQ ID NO: 14365 - DNA, 20 bp, synthetic construct
  misc_feature 1..20: note = Description of Artificial Sequence: Synthetic Antisense oligonucleotide
  modified_base 1..2: mod_base = OTHER; note = bicyclic nucleic acid (BNA)
  modified_base 5: mod_base = OTHER; note = bicyclic nucleic acid (BNA)
  modified_base 13: mod_base = OTHER; note = bicyclic nucleic acid (BNA)
  source 1..20: mol_type = other DNA
tcaaggaagatggcatttct

SEQ ID NO: 14366 - DNA, 20 bp, synthetic construct
  misc_feature 1..20: note = Description of Artificial Sequence: Synthetic Antisense oligonucleotide
  modified_base 1..2: mod_base = OTHER; note = bicyclic nucleic acid (BNA)
  modified_base 6: mod_base = OTHER; note = bicyclic nucleic acid (BNA)
  modified_base 9: mod_base = OTHER; note = bicyclic nucleic acid (BNA)
  source 1..20: mol_type = other DNA
tcaaggaagatggcatttct

SEQ ID NO: 14367 - DNA, 20 bp, synthetic construct
  misc_feature 1..20: note = Description of Artificial Sequence: Synthetic Antisense oligonucleotide
  modified_base 1..2: mod_base = OTHER; note = bicyclic nucleic acid (BNA)
  modified_base 13..14: mod_base = OTHER; note = bicyclic nucleic acid (BNA)
  source 1..20: mol_type = other DNA
tcaaggaagatggcatttct

SEQ ID NO: 14368 - DNA, 20 bp, synthetic construct
  misc_feature 1..20: note = Description of Artificial Sequence: Synthetic Antisense oligonucleotide
  modified_base 1..2: mod_base = OTHER; note = bicyclic nucleic acid (BNA)
  modified_base 6: mod_base = OTHER; note = bicyclic nucleic acid (BNA)
  modified_base 13: mod_base = OTHER; note = bicyclic nucleic acid (BNA)
  source 1..20: mol_type = other DNA
tcaaggaagatggcatttct

SEQ ID NO: 14369 - DNA, 20 bp, synthetic construct
  misc_feature 1..20: note = Description of Artificial Sequence: Synthetic Antisense oligonucleotide
  modified_base 1..2: mod_base = OTHER; note = bicyclic nucleic acid (BNA)
  modified_base 6: mod_base = OTHER; note = bicyclic nucleic acid (BNA)
  modified_base 19: mod_base = OTHER; note = bicyclic nucleic acid (BNA)
  source 1..20: mol_type = other DNA
tcaaggaagatggcatttct

SEQ ID NO: 14370 - DNA, 20 bp, synthetic construct
  misc_feature 1..20: note = Description of Artificial Sequence: Synthetic Antisense oligonucleotide
  modified_base 1..2: mod_base = OTHER; note = bicyclic nucleic acid (BNA)
  modified_base 5: mod_base = OTHER; note = bicyclic nucleic acid (BNA)
  modified_base 14: mod_base = OTHER; note = bicyclic nucleic acid (BNA)
  source 1..20: mol_type = other DNA
tcaaggaagatggcatttct

SEQ ID NO: 14371 - DNA, 20 bp, synthetic construct
  misc_feature 1..20: note = Description of Artificial Sequence: Synthetic Antisense oligonucleotide
  modified_base 1..2: mod_base = OTHER; note = bicyclic nucleic acid (BNA)
  modified_base 12: mod_base = OTHER; note = bicyclic nucleic acid (BNA)
  modified_base 19: mod_base = OTHER; note = bicyclic nucleic acid (BNA)
  source 1..20: mol_type = other DNA
tcaaggaagatggcatttct

SEQ ID NO: 14372 - DNA, 20 bp, synthetic construct
  misc_feature 1..20: note = Description of Artificial Sequence: Synthetic Antisense oligonucleotide
  modified_base 1..2: mod_base = OTHER; note = bicyclic nucleic acid (BNA)
  modified_base 12: mod_base = OTHER; note = bicyclic nucleic acid (BNA)
  modified_base 14: mod_base = OTHER; note = bicyclic nucleic acid (BNA)
  source 1..20: mol_type = other DNA
tcaaggaagatggcatttct

SEQ ID NO: 14373 - DNA, 20 bp, synthetic construct
  misc_feature 1..20: note = Description of Artificial Sequence: Synthetic Antisense oligonucleotide
  modified_base 1..2: mod_base = OTHER; note = bicyclic nucleic acid (BNA)
  modified_base 6: mod_base = OTHER; note = bicyclic nucleic acid (BNA)
  modified_base 12: mod_base = OTHER; note = bicyclic nucleic acid (BNA)
  source 1..20: mol_type = other DNA
tcaaggaagatggcatttct

SEQ ID NO: 14374 - DNA, 20 bp, synthetic construct
  misc_feature 1..20: note = Description of Artificial Sequence: Synthetic Antisense oligonucleotide
  modified_base 1..2: mod_base = OTHER; note = bicyclic nucleic acid (BNA)
  modified_base 5..6: mod_base = OTHER; note = bicyclic nucleic acid (BNA)
  source 1..20: mol_type = other DNA
tcaaggaagatggcatttct

SEQ ID NO: 14375 - DNA, 20 bp, synthetic construct
  misc_feature 1..20: note = Description of Artificial Sequence: Synthetic Antisense oligonucleotide
  modified_base 1..2: mod_base = OTHER; note = bicyclic nucleic acid (BNA)
  modified_base 9: mod_base = OTHER; note = bicyclic nucleic acid (BNA)
  modified_base 12: mod_base = OTHER; note = bicyclic nucleic acid (BNA)
  source 1..20: mol_type = other DNA
tcaaggaagatggcatttct

SEQ ID NO: 14376 - DNA, 20 bp, synthetic construct
  misc_feature 1..20: note = Description of Artificial Sequence: Synthetic Antisense oligonucleotide
  modified_base 1..2: mod_base = OTHER; note = bicyclic nucleic acid (BNA)
  modified_base 13: mod_base = OTHER; note = bicyclic nucleic acid (BNA)
  modified_base 19: mod_base = OTHER; note = bicyclic nucleic acid (BNA)
  source 1..20: mol_type = other DNA
tcaaggaagatggcatttct

SEQ ID NO: 14377 - DNA, 20 bp, synthetic construct
  misc_feature 1..20: note = Description of Artificial Sequence: Synthetic Antisense oligonucleotide
  modified_base 1..2: mod_base = OTHER; note = bicyclic nucleic acid (BNA)
  modified_base 12..13: mod_base = OTHER; note = bicyclic nucleic acid (BNA)
  source 1..20: mol_type = other DNA
tcaaggaagatggcatttct

SEQ ID NO: 14378 - DNA, 20 bp, synthetic construct
  misc_feature 1..20: note = Description of Artificial Sequence: Synthetic Antisense oligonucleotide
  modified_base 1..2: mod_base = OTHER; note = bicyclic nucleic acid (BNA)
  modified_base 5: mod_base = OTHER; note = bicyclic nucleic acid (BNA)
  modified_base 12: mod_base = OTHER; note = bicyclic nucleic acid (BNA)
  source 1..20: mol_type = other DNA
tcaaggaagatggcatttct

SEQ ID NO: 14379 - DNA, 20 bp, synthetic construct
  misc_feature 1..20: note = Description of Artificial Sequence: Synthetic Antisense oligonucleotide
  modified_base 1..2: mod_base = OTHER; note = bicyclic nucleic acid (BNA)
  modified_base 9: mod_base = OTHER; note = bicyclic nucleic acid (BNA)
  modified_base 13: mod_base = OTHER; note = bicyclic nucleic acid (BNA)
  source 1..20: mol_type = other DNA
tcaaggaagatggcatttct

SEQ ID NO: 14380 - DNA, 20 bp, synthetic construct
  misc_feature 1..20: note = Description of Artificial Sequence: Synthetic Antisense oligonucleotide
  modified_base 1..2: mod_base = OTHER; note = bicyclic nucleic acid (BNA)
  modified_base 14: mod_base = OTHER; note = bicyclic nucleic acid (BNA)
  modified_base 19: mod_base = OTHER; note = bicyclic nucleic acid (BNA)
  source 1..20: mol_type = other DNA
tcaaggaagatggcatttct

SEQ ID NO: 14381 - DNA, 20 bp, synthetic construct
  misc_feature 1..20: note = Description of Artificial Sequence: Synthetic Antisense oligonucleotide
  modified_base 1..2: mod_base = OTHER; note = bicyclic nucleic acid (BNA)
  modified_base 9: mod_base = OTHER; note = bicyclic nucleic acid (BNA)
  modified_base 19: mod_base = OTHER; note = bicyclic nucleic acid (BNA)
  source 1..20: mol_type = other DNA
tcaaggaagatggcatttct

SEQ ID NO: 14382 - DNA, 22 bp, synthetic construct
  misc_feature 1..22: note = Description of Artificial Sequence: Synthetic Antisense oligonucleotide
  modified_base 1..2: mod_base = OTHER; note = bicyclic nucleic acid (BNA)
  modified_base 9: mod_base = OTHER; note = bicyclic nucleic acid (BNA)
  modified_base 14: mod_base = OTHER; note = bicyclic nucleic acid (BNA)
  source 1..22: mol_type = other DNA
tcaaggaagatggcatttctag

SEQ ID NO: 14383 - DNA, 22 bp, synthetic construct
  misc_feature 1..22: note = Description of Artificial Sequence: Synthetic Antisense oligonucleotide
  modified_base 1..2: mod_base = OTHER; note = bicyclic nucleic acid (BNA)
  modified_base 5: mod_base = OTHER; note = bicyclic nucleic acid (BNA)
  modified_base 9: mod_base = OTHER; note = bicyclic nucleic acid (BNA)
  source 1..22: mol_type = other DNA
tcaaggaagatggcatttctag

SEQ ID NO: 14384 - DNA, 22 bp, synthetic construct
  misc_feature 1..22: note = Description of Artificial Sequence: Synthetic Antisense oligonucleotide
  modified_base 1..2: mod_base = OTHER; note = bicyclic nucleic acid (BNA)
  modified_base 5: mod_base = OTHER; note = bicyclic nucleic acid (BNA)
  modified_base 19: mod_base = OTHER; note = bicyclic nucleic acid (BNA)
  source 1..22: mol_type = other DNA
tcaaggaagatggcatttctag

SEQ ID NO: 14385 - DNA, 22 bp, synthetic construct
  misc_feature 1..22: note = Description of Artificial Sequence: Synthetic Antisense oligonucleotide
  modified_base 1..2: mod_base = OTHER; note = bicyclic nucleic acid (BNA)
  modified_base 6: mod_base = OTHER; note = bicyclic nucleic acid (BNA)
  modified_base 14: mod_base = OTHER; note = bicyclic nucleic acid (BNA)
  source 1..22: mol_type = other DNA
tcaaggaagatggcatttctag

SEQ ID NO: 14386 - DNA, 22 bp, synthetic construct
  misc_feature 1..22: note = Description of Artificial Sequence: Synthetic Antisense oligonucleotide
  modified_base 1..2: mod_base = OTHER; note = bicyclic nucleic acid (BNA)
  modified_base 5: mod_base = OTHER; note = bicyclic nucleic acid (BNA)
  modified_base 13: mod_base = OTHER; note = bicyclic nucleic acid (BNA)
  source 1..22: mol_type = other DNA
tcaaggaagatggcatttctag

SEQ ID NO: 14387 - DNA, 22 bp, synthetic construct
  misc_feature 1..22: note = Description of Artificial Sequence: Synthetic Antisense oligonucleotide
  modified_base 1..2: mod_base = OTHER; note = bicyclic nucleic acid (BNA)
  modified_base 6: mod_base = OTHER; note = bicyclic nucleic acid (BNA)
  modified_base 9: mod_base = OTHER; note = bicyclic nucleic acid (BNA)
  source 1..22: mol_type = other DNA
tcaaggaagatggcatttctag

SEQ ID NO: 14388 - DNA, 22 bp, synthetic construct
  misc_feature 1..22: note = Description of Artificial Sequence: Synthetic Antisense oligonucleotide
  modified_base 1..2: mod_base = OTHER; note = bicyclic nucleic acid (BNA)
  modified_base 13..14: mod_base = OTHER; note = bicyclic nucleic acid (BNA)
  source 1..22: mol_type = other DNA
tcaaggaagatggcatttctag

SEQ ID NO: 14389 - DNA, 22 bp, synthetic construct
  misc_feature 1..22: note = Description of Artificial Sequence: Synthetic Antisense oligonucleotide
  modified_base 1..2: mod_base = OTHER; note = bicyclic nucleic acid (BNA)
  modified_base 6: mod_base = OTHER; note = bicyclic nucleic acid (BNA)
  modified_base 13: mod_base = OTHER; note = bicyclic nucleic acid (BNA)
  source 1..22: mol_type = other DNA
tcaaggaagatggcatttctag

SEQ ID NO: 14390 - DNA, 22 bp, synthetic construct
  misc_feature 1..22: note = Description of Artificial Sequence: Synthetic Antisense oligonucleotide
  modified_base 1..2: mod_base = OTHER; note = bicyclic nucleic acid (BNA)
  modified_base 6: mod_base = OTHER; note = bicyclic nucleic acid (BNA)
  modified_base 19: mod_base = OTHER; note = bicyclic nucleic acid (BNA)
  source 1..22: mol_type = other DNA
tcaaggaagatggcatttctag

SEQ ID NO: 14391 - DNA, 22 bp, synthetic construct
  misc_feature 1..22: note = Description of Artificial Sequence: Synthetic Antisense oligonucleotide
  modified_base 1..2: mod_base = OTHER; note = bicyclic nucleic acid (BNA)
  modified_base 5: mod_base = OTHER; note = bicyclic nucleic acid (BNA)
  modified_base 14: mod_base = OTHER; note = bicyclic nucleic acid (BNA)
  source 1..22: mol_type = other DNA
tcaaggaagatggcatttctag

SEQ ID NO: 14392 - DNA, 22 bp, synthetic construct
  misc_feature 1..22: note = Description of Artificial Sequence: Synthetic Antisense oligonucleotide
  modified_base 1..2: mod_base = OTHER; note = bicyclic nucleic acid (BNA)
  modified_base 12: mod_base = OTHER; note = bicyclic nucleic acid (BNA)
  modified_base 19: mod_base = OTHER; note = bicyclic nucleic acid (BNA)
  source 1..22: mol_type = other DNA
tcaaggaagatggcatttctag

SEQ ID NO: 14393 - DNA, 22 bp, synthetic construct
  misc_feature 1..22: note = Description of Artificial Sequence: Synthetic Antisense oligonucleotide
  modified_base 1..2: mod_base = OTHER; note = bicyclic nucleic acid (BNA)
  modified_base 12: mod_base = OTHER; note = bicyclic nucleic acid (BNA)
  modified_base 14: mod_base = OTHER; note = bicyclic nucleic acid (BNA)
  source 1..22: mol_type = other DNA
tcaaggaagatggcatttctag

SEQ ID NO: 14394 - DNA, 22 bp, synthetic construct
  misc_feature 1..22: note = Description of Artificial Sequence: Synthetic Antisense oligonucleotide
  modified_base 1..2: mod_base = OTHER; note = bicyclic nucleic acid (BNA)
  modified_base 6: mod_base = OTHER; note = bicyclic nucleic acid (BNA)
  modified_base 12: mod_base = OTHER; note = bicyclic nucleic acid (BNA)
  source 1..22: mol_type = other DNA
tcaaggaagatggcatttctag

SEQ ID NO: 14395 - DNA, 22 bp, synthetic construct
  misc_feature 1..22: note = Description of Artificial Sequence: Synthetic Antisense oligonucleotide
  modified_base 1..2: mod_base = OTHER; note = bicyclic nucleic acid (BNA)
  modified_base 5..6: mod_base = OTHER; note = bicyclic nucleic acid (BNA)
  source 1..22: mol_type = other DNA
tcaaggaagatggcatttctag

SEQ ID NO: 14396 - DNA, 22 bp, synthetic construct
  misc_feature 1..22: note = Description of Artificial Sequence: Synthetic Antisense oligonucleotide
  modified_base 1..2: mod_base = OTHER; note = bicyclic nucleic acid (BNA)
  modified_base 9: mod_base = OTHER; note = bicyclic nucleic acid (BNA)
  modified_base 12: mod_base = OTHER; note = bicyclic nucleic acid (BNA)
  source 1..22: mol_type = other DNA
tcaaggaagatggcatttctag

SEQ ID NO: 14397 - DNA, 22 bp, synthetic construct
  misc_feature 1..22: note = Description of Artificial Sequence: Synthetic Antisense oligonucleotide
  modified_base 1..2: mod_base = OTHER; note = bicyclic nucleic acid (BNA)
  modified_base 13: mod_base = OTHER; note = bicyclic nucleic acid (BNA)
  modified_base 19: mod_base = OTHER; note = bicyclic nucleic acid (BNA)
  source 1..22: mol_type = other DNA
tcaaggaagatggcatttctag

SEQ ID NO: 14398 - DNA, 22 bp, synthetic construct
  misc_feature 1..22: note = Description of Artificial Sequence: Synthetic Antisense oligonucleotide
  modified_base 1..2: mod_base = OTHER; note = bicyclic nucleic acid (BNA)
  modified_base 12..13: mod_base = OTHER; note = bicyclic nucleic acid (BNA)
  source 1..22: mol_type = other DNA
tcaaggaagatggcatttctag

SEQ ID NO: 14399 - DNA, 22 bp, synthetic construct
  misc_feature 1..22: note = Description of Artificial Sequence: Synthetic Antisense oligonucleotide
  modified_base 1..2: mod_base = OTHER; note = bicyclic nucleic acid (BNA)
  modified_base 5: mod_base = OTHER; note = bicyclic nucleic acid (BNA)
  modified_base 12: mod_base = OTHER; note = bicyclic nucleic acid (BNA)
  source 1..22: mol_type = other DNA
tcaaggaagatggcatttctag

SEQ ID NO: 14400 - DNA, 22 bp, synthetic construct
  misc_feature 1..22: note = Description of Artificial Sequence: Synthetic Antisense oligonucleotide
  modified_base 1..2: mod_base = OTHER; note = bicyclic nucleic acid (BNA)
  modified_base 9: mod_base = OTHER; note = bicyclic nucleic acid (BNA)
  modified_base 13: mod_base = OTHER; note = bicyclic nucleic acid (BNA)
  source 1..22: mol_type = other DNA
tcaaggaagatggcatttctag

SEQ ID NO: 14401 - DNA, 22 bp, synthetic construct
  misc_feature 1..22: note = Description of Artificial Sequence: Synthetic Antisense oligonucleotide
  modified_base 1..2: mod_base = OTHER; note = bicyclic nucleic acid (BNA)
  modified_base 14: mod_base = OTHER; note = bicyclic nucleic acid (BNA)
  modified_base 19: mod_base = OTHER; note = bicyclic nucleic acid (BNA)
  source 1..22: mol_type = other DNA
tcaaggaagatggcatttctag

SEQ ID NO: 14402 - DNA, 22 bp, synthetic construct
  misc_feature 1..22: note = Description of Artificial Sequence: Synthetic Antisense oligonucleotide
  modified_base 1..2: mod_base = OTHER; note = bicyclic nucleic acid (BNA)
  modified_base 9: mod_base = OTHER; note = bicyclic nucleic acid (BNA)
  modified_base 19: mod_base = OTHER; note = bicyclic nucleic acid (BNA)
  source 1..22: mol_type = other DNA
tcaaggaagatggcatttctag

SEQ ID NO: 14403 - DNA, 18 bp, synthetic construct
  misc_feature 1..18: note = Description of Artificial Sequence: Synthetic Antisense oligonucleotide
  modified_base 1..2: mod_base = OTHER; note = bicyclic nucleic acid (BNA)
  modified_base 9: mod_base = OTHER; note = bicyclic nucleic acid (BNA)
  modified_base 9: mod_base = OTHER; note = 5-methyl
  modified_base 13..14: mod_base = OTHER; note = 5-methyl
  modified_base 18: mod_base = OTHER; note = 5-methyl
  source 1..18: mol_type = other DNA
ggtaagttctgtccaagc

SEQ ID NO: 14404 - DNA, 18 bp, synthetic construct
  misc_feature 1..18: note = Description of Artificial Sequence: Synthetic Antisense oligonucleotide
  modified_base 1..2: mod_base = OTHER; note = bicyclic nucleic acid (BNA)
  modified_base 11: mod_base = OTHER; note = bicyclic nucleic acid (BNA)
  modified_base 9: mod_base = OTHER; note = 5-methyl
  modified_base 13..14: mod_base = OTHER; note = 5-methyl
  modified_base 18: mod_base = OTHER; note = 5-methyl
  source 1..18: mol_type = other DNA
ggtaagttctgtccaagc

SEQ ID NO: 14405 - DNA, 18 bp, synthetic construct
  misc_feature 1..18: note = Description of Artificial Sequence: Synthetic Antisense oligonucleotide
  modified_base 1..2: mod_base = OTHER; note = bicyclic nucleic acid (BNA)
  modified_base 6: mod_base = OTHER; note = bicyclic nucleic acid (BNA)
  modified_base 9: mod_base = OTHER; note = 5-methyl
  modified_base 13..14: mod_base = OTHER; note = 5-methyl
  modified_base 18: mod_base = OTHER; note = 5-methyl
  source 1..18: mol_type = other DNA
ggtaagttctgtccaagc

SEQ ID NO: 14406 - DNA, 18 bp, synthetic construct
  misc_feature 1..18: note = Description of Artificial Sequence: Synthetic Antisense oligonucleotide
  modified_base 1..2: mod_base = OTHER; note = bicyclic nucleic acid (BNA)
  modified_base 17: mod_base = OTHER; note = bicyclic nucleic acid (BNA)
  modified_base 9: mod_base = OTHER; note = 5-methyl
  modified_base 13..14: mod_base = OTHER; note = 5-methyl
  modified_base 18: mod_base = OTHER; note = 5-methyl
  source 1..18: mol_type = other DNA
ggtaagttctgtccaagc

SEQ ID NO: 14407 - DNA, 18 bp, synthetic construct
  misc_feature 1..18: note = Description of Artificial Sequence: Synthetic Antisense oligonucleotide
  modified_base 1..2: mod_base = OTHER; note = bicyclic nucleic acid (BNA)
  modified_base 13: mod_base = OTHER; note = bicyclic nucleic acid (BNA)
  modified_base 9: mod_base = OTHER; note = 5-methyl
  modified_base 13..14: mod_base = OTHER; note = 5-methyl
  modified_base 18: mod_base = OTHER; note = 5-methyl
  source 1..18: mol_type = other DNA
ggtaagttctgtccaagc

SEQ ID NO: 14408 - DNA, 18 bp, synthetic construct
  misc_feature 1..18: note = Description of Artificial Sequence: Synthetic Antisense oligonucleotide
  modified_base 1..2: mod_base = OTHER; note = bicyclic nucleic acid (BNA)
  modified_base 14: mod_base = OTHER; note = bicyclic nucleic acid (BNA)
  modified_base 9: mod_base = OTHER; note = 5-methyl
  modified_base 13..14: mod_base = OTHER; note = 5-methyl
  modified_base 18: mod_base = OTHER; note = 5-methyl
  source 1..18: mol_type = other DNA
ggtaagttctgtccaagc

SEQ ID NO: 14409 - DNA, 18 bp, synthetic construct
  misc_feature 1..18: note = Description of Artificial Sequence: Synthetic Antisense oligonucleotide
  modified_base 1..2: mod_base = OTHER; note = bicyclic nucleic acid (BNA)
  modified_base 16: mod_base = OTHER; note = bicyclic nucleic acid (BNA)
  modified_base 8: mod_base = OTHER; note = 5-methyl
  modified_base 12..13: mod_base = OTHER; note = 5-methyl
  modified_base 17..18: mod_base = OTHER; note = 5-methyl
  source 1..18: mol_type = other DNA
gtaagttctgtccaagcc

SEQ ID NO: 14410 - DNA, 18 bp, synthetic construct
  misc_feature 1..18: note = Description of Artificial Sequence: Synthetic Antisense oligonucleotide
  modified_base 1..2: mod_base = OTHER; note = bicyclic nucleic acid (BNA)
  modified_base 10: mod_base = OTHER; note = bicyclic nucleic acid (BNA)
  modified_base 8: mod_base = OTHER; note = 5-methyl
  modified_base 12..13: mod_base = OTHER; note = 5-methyl
  modified_base 17..18: mod_base = OTHER; note = 5-methyl
  source 1..18: mol_type = other DNA
gtaagttctgtccaagcc

SEQ ID NO: 14411 - DNA, 18 bp, synthetic construct
  misc_feature 1..18: note = Description of Artificial Sequence: Synthetic Antisense oligonucleotide
  modified_base 1..2: mod_base = OTHER; note = bicyclic nucleic acid (BNA)
  modified_base 5: mod_base = OTHER; note = bicyclic nucleic acid (BNA)
  modified_base 8: mod_base = OTHER; note = 5-methyl
  modified_base 12..13: mod_base = OTHER; note = 5-methyl
  modified_base 17..18: mod_base = OTHER; note = 5-methyl
  source 1..18: mol_type = other DNA
gtaagttctgtccaagcc

SEQ ID NO: 14412 - DNA, 18 bp, synthetic construct
  misc_feature 1..18: note = Description of Artificial Sequence: Synthetic Antisense oligonucleotide
  modified_base 1..2: mod_base = OTHER; note = bicyclic nucleic acid (BNA)
  modified_base 17: mod_base = OTHER; note = bicyclic nucleic acid (BNA)
  modified_base 8: mod_base = OTHER; note = 5-methyl
  modified_base 12..13: mod_base = OTHER; note = 5-methyl
  modified_base 17..18: mod_base = OTHER; note = 5-methyl
  source 1..18: mol_type = other DNA
gtaagttctgtccaagcc

SEQ ID NO: 14413 - DNA, 18 bp, synthetic construct
  misc_feature 1..18: note = Description of Artificial Sequence: Synthetic Antisense oligonucleotide
  modified_base 1..2: mod_base = OTHER; note = bicyclic nucleic acid (BNA)
  modified_base 12: mod_base = OTHER; note = bicyclic nucleic acid (BNA)
  modified_base 8: mod_base = OTHER; note = 5-methyl
  modified_base 12..13: mod_base = OTHER; note = 5-methyl
  modified_base 17..18: mod_base = OTHER; note = 5-methyl
  source 1..18: mol_type = other DNA
gtaagttctgtccaagcc

SEQ ID NO: 14414 - DNA, 18 bp, synthetic construct
  misc_feature 1..18: note = Description of Artificial Sequence: Synthetic Antisense oligonucleotide
  modified_base 1..2: mod_base = OTHER; note = bicyclic nucleic acid (BNA)
  modified_base 13: mod_base = OTHER; note = bicyclic nucleic acid (BNA)
  modified_base 8: mod_base = OTHER; note = 5-methyl
  modified_base 12..13: mod_base = OTHER; note = 5-methyl
  modified_base 17..18: mod_base = OTHER; note = 5-methyl
  source 1..18: mol_type = other DNA
gtaagttctgtccaagcc

SEQ ID NO: 14415 - DNA, 18 bp, synthetic construct
  misc_feature 1..18: note = Description of Artificial Sequence: Synthetic Antisense oligonucleotide
  modified_base 1..2: mod_base = OTHER; note = bicyclic nucleic acid (BNA)
  modified_base 8: mod_base = OTHER; note = bicyclic nucleic acid (BNA)
  modified_base 8: mod_base = OTHER; note = 5-methyl
  modified_base 12..13: mod_base = OTHER; note = 5-methyl
  modified_base 17..18: mod_base = OTHER; note = 5-methyl
  source 1..18: mol_type = other DNA
gtaagttctgtccaagcc

SEQ ID NO: 14416 - DNA, 18 bp, synthetic construct
  misc_feature 1..18: note = Description of Artificial Sequence: Synthetic Antisense oligonucleotide
  modified_base 1..2: mod_base = OTHER; note = bicyclic nucleic acid (BNA)
  modified_base 4: mod_base = OTHER; note = bicyclic nucleic acid (BNA)
  modified_base 4: mod_base = OTHER; note = 5-methyl
  modified_base 13: mod_base = OTHER; note = 5-methyl
  modified_base 17..18: mod_base = OTHER; note = 5-methyl
  source 1..18: mol_type = other DNA
agtcggtaagttctgtcc

SEQ ID NO: 14417 - DNA, 18 bp, synthetic construct
  misc_feature 1..18: note = Description of Artificial Sequence: Synthetic Antisense oligonucleotide
  modified_base 1..2: mod_base = OTHER; note = bicyclic nucleic acid (BNA)
  modified_base 10: mod_base = OTHER; note = bicyclic nucleic acid (BNA)
  modified_base 4: mod_base = OTHER; note = 5-methyl
  modified_base 13: mod_base = OTHER; note = 5-methyl
  modified_base 17..18: mod_base = OTHER; note = 5-methyl
  source 1..18: mol_type = other DNA
agtcggtaagttctgtcc

SEQ ID NO: 14418 - DNA, 18 bp, synthetic construct
  misc_feature 1..18: note = Description of Artificial Sequence: Synthetic Antisense oligonucleotide
  modified_base 1..2: mod_base = OTHER; note = bicyclic nucleic acid (BNA)
  modified_base 5: mod_base = OTHER; note = bicyclic nucleic acid (BNA)
  modified_base 4: mod_base = OTHER; note = 5-methyl
  modified_base 13: mod_base = OTHER; note = 5-methyl
  modified_base 17..18: mod_base = OTHER; note = 5-methyl
  source 1..18: mol_type = other DNA
agtcggtaagttctgtcc

SEQ ID NO: 14419 - DNA, 18 bp, synthetic construct
  misc_feature 1..18: note = Description of Artificial Sequence: Synthetic Antisense oligonucleotide
  modified_base 1..2: mod_base = OTHER; note = bicyclic nucleic acid (BNA)
  modified_base 6: mod_base = OTHER; note = bicyclic nucleic acid (BNA)
  modified_base 4: mod_base = OTHER; note = 5-methyl
  modified_base 13: mod_base = OTHER; note = 5-methyl
  modified_base 17..18: mod_base = OTHER; note = 5-methyl
  source 1..18: mol_type = other DNA
agtcggtaagttctgtcc

SEQ ID NO: 14420 - DNA, 18 bp, synthetic construct
  misc_feature 1..18: note = Description of Artificial Sequence: Synthetic Antisense oligonucleotide
  modified_base 1..2: mod_base = OTHER; note = bicyclic nucleic acid (BNA)
  modified_base 17: mod_base = OTHER; note = bicyclic nucleic acid (BNA)
  modified_base 4: mod_base = OTHER; note = 5-methyl
  modified_base 13: mod_base = OTHER; note = 5-methyl
  modified_base 17..18: mod_base = OTHER; note = 5-methyl
  source 1..18: mol_type = other DNA
agtcggtaagttctgtcc

SEQ ID NO: 14421 - DNA, 18 bp, synthetic construct
  misc_feature 1..18: note = Description of Artificial Sequence: Synthetic Antisense oligonucleotide
  modified_base 1..2: mod_base = OTHER; note = bicyclic nucleic acid (BNA)
  modified_base 13: mod_base = OTHER; note = bicyclic nucleic acid (BNA)
  modified_base 4: mod_base = OTHER; note = 5-methyl
  modified_base 13: mod_base = OTHER; note = 5-methyl
  modified_base 17..18: mod_base = OTHER; note = 5-methyl
  source 1..18: mol_type = other DNA
agtcggtaagttctgtcc

SEQ ID NO: 14422 - DNA, 18 bp, synthetic construct
  misc_feature 1..18: note = Description of Artificial Sequence: Synthetic Antisense oligonucleotide
  modified_base 1..2: mod_base = OTHER; note = bicyclic nucleic acid (BNA)
  modified_base 15: mod_base = OTHER; note = bicyclic nucleic acid (BNA)
  modified_base 4: mod_base = OTHER; note = 5-methyl
  modified_base 13: mod_base = OTHER; note = 5-methyl
  modified_base 17..18: mod_base = OTHER; note = 5-methyl
  source 1..18: mol_type = other DNA
agtcggtaagttctgtcc

SEQ ID NO: 14423 - DNA, 18 bp, synthetic construct
  misc_feature 1..18: note = Description of Artificial Sequence: Synthetic Antisense oligonucleotide
  modified_base 1: mod_base = OTHER; note = 5-methyl
  modified_base 5..6: mod_base = OTHER; note = 5-methyl
  modified_base 10..12: mod_base = OTHER; note = 5-methyl
  modified_base 1..3: mod_base = OTHER; note = bicyclic nucleic acid (BNA)
  source 1..18: mol_type = other DNA
ctgtccaagcccggttga

SEQ ID NO: 14424 - DNA, 18 bp, synthetic construct
  misc_feature 1..18: note = Description of Artificial Sequence: Synthetic Antisense oligonucleotide
  modified_base 1: mod_base = OTHER; note = 5-methyl
  modified_base 5..6: mod_base = OTHER; note = 5-methyl
  modified_base 10..12: mod_base = OTHER; note = 5-methyl
  modified_base 1..2: mod_base = OTHER; note = bicyclic nucleic acid (BNA)
  modified_base 9: mod_base = OTHER; note = bicyclic nucleic acid (BNA)
  source 1..18: mol_type = other DNA
ctgtccaagcccggttga

SEQ ID NO: 14425 - DNA, 18 bp, synthetic construct
  misc_feature 1..18: note = Description of Artificial Sequence: Synthetic Antisense oligonucleotide
  modified_base 1: mod_base = OTHER; note = 5-methyl
  modified_base 5..6: mod_base = OTHER; note = 5-methyl
  modified_base 10..12: mod_base = OTHER; note = 5-methyl
  modified_base 1..2: mod_base = OTHER; note = bicyclic nucleic acid (BNA)
  modified_base 10: mod_base = OTHER; note = bicyclic nucleic acid (BNA)
  source 1..18: mol_type = other DNA
ctgtccaagcccggttga

SEQ ID NO: 14426 - DNA, 18 bp, synthetic construct
  misc_feature 1..18: note = Description of Artificial Sequence: Synthetic Antisense oligonucleotide
  modified_base 1: mod_base = OTHER; note = 5-methyl
  modified_base 5..6: mod_base = OTHER; note = 5-methyl
  modified_base 10..12: mod_base = OTHER; note = 5-methyl
  modified_base 1..2: mod_base = OTHER; note = bicyclic nucleic acid (BNA)
  modified_base 5: mod_base = OTHER; note = bicyclic nucleic acid (BNA)
  source 1..18: mol_type = other DNA
ctgtccaagcccggttga

SEQ ID NO: 14427 - DNA, 18 bp, synthetic construct
  misc_feature 1..18: note = Description of Artificial Sequence: Synthetic Antisense oligonucleotide
  modified_base 1: mod_base = OTHER; note = 5-methyl
  modified_base 5..6: mod_base = OTHER; note = 5-methyl
  modified_base 10..12: mod_base = OTHER; note = 5-methyl
  modified_base 1..2: mod_base = OTHER; note = bicyclic nucleic acid (BNA)
  modified_base 11: mod_base = OTHER; note = bicyclic nucleic acid (BNA)
  source 1..18: mol_type = other DNA
ctgtccaagcccggttga

SEQ ID NO: 14428 - DNA, 18 bp, synthetic construct
  misc_feature 1..18: note = Description of Artificial Sequence: Synthetic Antisense oligonucleotide
  modified_base 1: mod_base = OTHER; note = 5-methyl
  modified_base 5..6: mod_base = OTHER; note = 5-methyl
  modified_base 10..12: mod_base = OTHER; note = 5-methyl
  modified_base 1..2: mod_base = OTHER; note = bicyclic nucleic acid (BNA)
  modified_base 6: mod_base = OTHER; note = bicyclic nucleic acid (BNA)
  source 1..18: mol_type = other DNA
ctgtccaagcccggttga

SEQ ID NO: 14429 - DNA, 18 bp, synthetic construct
  misc_feature 1..18: note = Description of Artificial Sequence: Synthetic Antisense oligonucleotide
  modified_base 1: mod_base = OTHER; note = 5-methyl
  modified_base 5..6: mod_base = OTHER; note = 5-methyl
  modified_base 10..12: mod_base = OTHER; note = 5-methyl
  modified_base 1..2: mod_base = OTHER; note = bicyclic nucleic acid (BNA)
  modified_base 17: mod_base = OTHER; note = bicyclic nucleic acid (BNA)
  source 1..18: mol_type = other DNA
ctgtccaagcccggttga

SEQ ID NO: 14430 - DNA, 18 bp, synthetic construct
  misc_feature 1..18: note = Description of Artificial Sequence: Synthetic Antisense oligonucleotide
  modified_base 1: mod_base = OTHER; note = 5-methyl
  modified_base 5..6: mod_base = OTHER; note = 5-methyl
  modified_base 10..12: mod_base = OTHER; note = 5-methyl
  modified_base 1..2: mod_base = OTHER; note = bicyclic nucleic acid (BNA)
  modified_base 12: mod_base = OTHER; note = bicyclic nucleic acid (BNA)
  source 1..18: mol_type = other DNA
ctgtccaagcccggttga

SEQ ID NO: 14431 - DNA, 18 bp, synthetic construct
  misc_feature 1..18: note = Description of Artificial Sequence: Synthetic Antisense oligonucleotide
  modified_base 1: mod_base = OTHER; note = 5-methyl
  modified_base 5..6: mod_base = OTHER; note = 5-methyl
  modified_base 10..12: mod_base = OTHER; note = 5-methyl
  modified_base 1..2: mod_base = OTHER; note = bicyclic nucleic acid (BNA)
  modified_base 13: mod_base = OTHER; note = bicyclic nucleic acid (BNA)
  source 1..18: mol_type = other DNA
ctgtccaagcccggttga

SEQ ID NO: 14432 - DNA, 18 bp, synthetic construct
  misc_feature 1..18: note = Description of Artificial Sequence: Synthetic Antisense oligonucleotide
  modified_base 1: mod_base = OTHER; note = 5-methyl
  modified_base 5..6: mod_base = OTHER; note = 5-methyl
  modified_base 10..12: mod_base = OTHER; note = 5-methyl
  modified_base 1..2: mod_base = OTHER; note = bicyclic nucleic acid (BNA)
  modified_base 14: mod_base = OTHER; note = bicyclic nucleic acid (BNA)
  source 1..18: mol_type = other DNA
ctgtccaagcccggttga

SEQ ID NO: 14433 - DNA, 18 bp, synthetic construct
  misc_feature 1..18: note = Description of Artificial Sequence: Synthetic Antisense oligonucleotide
  modified_base 1..2: mod_base = OTHER; note = bicyclic nucleic acid (BNA)
  modified_base 6: mod_base = OTHER; note = bicyclic nucleic acid (BNA)
  modified_base 11: mod_base = OTHER; note = bicyclic nucleic acid (BNA)
  modified_base 9: mod_base = OTHER; note = 5-methyl
  modified_base 13..14: mod_base = OTHER; note = 5-methyl
  modified_base 18: mod_base = OTHER; note = 5-methyl
  source 1..18: mol_type = other DNA
ggtaagttctgtccaagc

SEQ ID NO: 14434 - DNA, 18 bp, synthetic construct
  misc_feature 1..18: note = Description of Artificial Sequence: Synthetic Antisense oligonucleotide
  modified_base 1..2: mod_base = OTHER; note = bicyclic nucleic acid (BNA)
  modified_base 9: mod_base = OTHER; note = bicyclic nucleic acid (BNA)
  modified_base 14: mod_base = OTHER; note = bicyclic nucleic acid (BNA)
  modified_base 9: mod_base = OTHER; note = 5-methyl
  modified_base 13..14: mod_base = OTHER; note = 5-methyl
  modified_base 18: mod_base = OTHER; note = 5-methyl
  source 1..18: mol_type = other DNA
ggtaagttctgtccaagc

SEQ ID NO: 14435 - DNA, 18 bp, synthetic construct
  misc_feature 1..18: note = Description of Artificial Sequence: Synthetic Antisense oligonucleotide
  modified_base 1..2: mod_base = OTHER; note = bicyclic nucleic acid (BNA)
  modified_base 6: mod_base = OTHER; note = bicyclic nucleic acid (BNA)
  modified_base 17: mod_base = OTHER; note = bicyclic nucleic acid (BNA)
  modified_base 9: mod_base = OTHER; note = 5-methyl
  modified_base 13..14: mod_base = OTHER; note = 5-methyl
  modified_base 18: mod_base = OTHER; note = 5-methyl
  source 1..18: mol_type = other DNA
ggtaagttctgtccaagc

SEQ ID NO: 14436 - DNA, 18 bp, synthetic construct
  misc_feature 1..18: note = Description of Artificial Sequence: Synthetic Antisense oligonucleotide
  modified_base 1..2: mod_base = OTHER; note = bicyclic nucleic acid (BNA)
  modified_base 9: mod_base = OTHER; note = bicyclic nucleic acid (BNA)
  modified_base 13: mod_base = OTHER; note = bicyclic nucleic acid (BNA)
  modified_base 9: mod_base = OTHER; note = 5-methyl
  modified_base 13..14: mod_base = OTHER; note = 5-methyl
  modified_base 18: mod_base = OTHER; note = 5-methyl
  source 1..18: mol_type = other DNA
ggtaagttctgtccaagc

SEQ ID NO: 14437 - DNA, 18 bp, synthetic construct
  misc_feature 1..18: note = Description of Artificial Sequence: Synthetic Antisense oligonucleotide
  modified_base 1..2: mod_base = OTHER; note = bicyclic nucleic acid (BNA)
  modified_base 13..14: mod_base = OTHER; note = bicyclic nucleic acid (BNA)
  modified_base 9: mod_base = OTHER; note = 5-methyl
  modified_base 13..14: mod_base = OTHER; note = 5-methyl
  modified_base 18: mod_base = OTHER; note = 5-methyl
  source 1..18: mol_type = other DNA
ggtaagttctgtccaagc

SEQ ID NO: 14438 - DNA, 18 bp, synthetic construct
  misc_feature 1..18: note = Description of Artificial Sequence: Synthetic Antisense oligonucleotide
  modified_base 1..2: mod_base = OTHER; note = bicyclic nucleic acid (BNA)
  modified_base 11: mod_base = OTHER; note = bicyclic nucleic acid (BNA)
  modified_base 17: mod_base = OTHER; note = bicyclic nucleic acid (BNA)
  modified_base 9: mod_base = OTHER; note = 5-methyl
  modified_base 13..14: mod_base = OTHER; note = 5-methyl
  modified_base 18: mod_base = OTHER; note = 5-methyl
  source 1..18: mol_type = other DNA
ggtaagttctgtccaagc

SEQ ID NO: 14439 - DNA, 18 bp, synthetic construct
  misc_feature 1..18: note = Description of Artificial Sequence: Synthetic Antisense oligonucleotide
  modified_base 1..2: mod_base = OTHER; note = bicyclic nucleic acid (BNA)
  modified_base 11: mod_base = OTHER; note = bicyclic nucleic acid (BNA)
  modified_base 14: mod_base = OTHER; note = bicyclic nucleic acid (BNA)
  modified_base 9: mod_base = OTHER; note = 5-methyl
  modified_base 13..14: mod_base = OTHER; note = 5-methyl
  modified_base 18: mod_base = OTHER; note = 5-methyl
  source 1..18: mol_type = other DNA
ggtaagttctgtccaagc

SEQ ID NO: 14440 - DNA, 18 bp, synthetic construct
  misc_feature 1..18: note = Description of Artificial Sequence: Synthetic Antisense oligonucleotide
  modified_base 1..2: mod_base = OTHER; note = bicyclic nucleic acid (BNA)
  modified_base 6: mod_base = OTHER; note = bicyclic nucleic acid (BNA)
  modified_base 13: mod_base = OTHER; note = bicyclic nucleic acid (BNA)
  modified_base 9: mod_base = OTHER; note = 5-methyl
  modified_base 13..14: mod_base = OTHER; note = 5-methyl
  modified_base 18: mod_base = OTHER; note = 5-methyl
  source 1..18: mol_type = other DNA
ggtaagttctgtccaagc

SEQ ID NO: 14441 - DNA, 18 bp, synthetic construct
  misc_feature 1..18: note = Description of Artificial Sequence: Synthetic Antisense oligonucleotide
  modified_base 1..2: mod_base = OTHER; note = bicyclic nucleic acid (BNA)
  modified_base 6: mod_base = OTHER; note = bicyclic nucleic acid (BNA)
  modified_base 14: mod_base = OTHER; note = bicyclic nucleic acid (BNA)
  modified_base 9: mod_base = OTHER; note = 5-methyl
  modified_base 13..14: mod_base = OTHER; note = 5-methyl
  modified_base 18: mod_base = OTHER; note = 5-methyl
  source 1..18: mol_type = other DNA
ggtaagttctgtccaagc

SEQ ID NO: 14442 - DNA, 18 bp, synthetic construct
  misc_feature 1..18: note = Description of Artificial Sequence: Synthetic Antisense oligonucleotide
  modified_base 1..2: mod_base = OTHER; note = bicyclic nucleic acid (BNA)
  modified_base 14: mod_base = OTHER; note = bicyclic nucleic acid (BNA)
  modified_base 17: mod_base = OTHER; note = bicyclic nucleic acid (BNA)
  modified_base 9: mod_base = OTHER; note = 5-methyl
  modified_base 13..14: mod_base = OTHER; note = 5-methyl
  modified_base 18: mod_base = OTHER; note = 5-methyl
  source 1..18: mol_type = other DNA
ggtaagttctgtccaagc

SEQ ID NO: 14443 - DNA, 18 bp, synthetic construct
  misc_feature 1..18: note = Description of Artificial Sequence: Synthetic Antisense oligonucleotide
  modified_base 1..2: mod_base = OTHER; note = bicyclic nucleic acid (BNA)
  modified_base 9: mod_base = OTHER; note = bicyclic nucleic acid (BNA)
  modified_base 11: mod_base = OTHER; note = bicyclic nucleic acid (BNA)
  modified_base 9: mod_base = OTHER; note = 5-methyl
  modified_base 13..14: mod_base = OTHER; note = 5-methyl
  modified_base 18: mod_base = OTHER; note = 5-methyl
  source 1..18: mol_type = other DNA
ggtaagttctgtccaagc

SEQ ID NO: 14444 - DNA, 18 bp, synthetic construct
  misc_feature 1..18: note = Description of Artificial Sequence: Synthetic Antisense oligonucleotide
  modified_base 1..2: mod_base = OTHER; note = bicyclic nucleic acid (BNA)
  modified_base 11: mod_base = OTHER; note = bicyclic nucleic acid (BNA)
  modified_base 13: mod_base = OTHER; note = bicyclic nucleic acid (BNA)
  modified_base 9: mod_base = OTHER; note = 5-methyl
  modified_base 13..14: mod_base = OTHER; note = 5-methyl
  modified_base 18: mod_base = OTHER; note = 5-methyl
  source 1..18: mol_type = other DNA
ggtaagttctgtccaagc

SEQ ID NO: 14445 - DNA, 18 bp, synthetic construct
  misc_feature 1..18: note = Description of Artificial Sequence: Synthetic Antisense oligonucleotide
  modified_base 1..2: mod_base = OTHER; note = bicyclic nucleic acid (BNA)
  modified_base 13: mod_base = OTHER; note = bicyclic nucleic acid (BNA)
  modified_base 17: mod_base = OTHER; note = bicyclic nucleic acid (BNA)
  modified_base 9: mod_base = OTHER; note = 5-methyl
  modified_base 13..14: mod_base = OTHER; note = 5-methyl
  modified_base 18: mod_base = OTHER; note = 5-methyl
  source 1..18: mol_type = other DNA
ggtaagttctgtccaagc

SEQ ID NO: 14446 - DNA, 18 bp, synthetic construct
  misc_feature 1..18: note = Description of Artificial Sequence: Synthetic Antisense oligonucleotide
  modified_base 1..2: mod_base = OTHER; note = bicyclic nucleic acid (BNA)
  modified_base 9: mod_base = OTHER; note = bicyclic nucleic acid (BNA)
  modified_base 17: mod_base = OTHER; note = bicyclic nucleic acid (BNA)
  modified_base 9: mod_base = OTHER; note = 5-methyl
  modified_base 13..14: mod_base = OTHER; note = 5-methyl
  modified_base 18: mod_base = OTHER; note = 5-methyl
  source 1..18: mol_type = other DNA
ggtaagttctgtccaagc

SEQ ID NO: 14447 - DNA, 18 bp, synthetic construct
  misc_feature 1..18: note = Description of Artificial Sequence: Synthetic Antisense oligonucleotide
  modified_base 1..2: mod_base = OTHER; note = bicyclic nucleic acid (BNA)
  modified_base 6: mod_base = OTHER; note = bicyclic nucleic acid (BNA)
  modified_base 9: mod_base = OTHER; note = bicyclic nucleic acid (BNA)
  modified_base 9: mod_base = OTHER; note = 5-methyl
  modified_base 13..14: mod_base = OTHER; note = 5-methyl
  modified_base 18: mod_base = OTHER; note = 5-methyl
  source 1..18: mol_type = other DNA
ggtaagttctgtccaagc

SEQ ID NO: 14448 - DNA, 18 bp, synthetic construct
  misc_feature 1..18: note = Description of Artificial Sequence: Synthetic Antisense oligonucleotide
  modified_base 1..2: mod_base = OTHER; note = bicyclic nucleic acid (BNA)
  modified_base 12: mod_base = OTHER; note = bicyclic nucleic acid (BNA)
  modified_base 17: mod_base = OTHER; note = bicyclic nucleic acid (BNA)
  modified_base 8: mod_base = OTHER; note = 5-methyl
  modified_base 12..13: mod_base = OTHER; note = 5-methyl
  modified_base 17..18: mod_base = OTHER; note = 5-methyl
  source 1..18: mol_type = other DNA
gtaagttctgtccaagcc

SEQ ID NO: 14449 - DNA, 18 bp, synthetic construct
  misc_feature 1..18: note = Description of Artificial Sequence: Synthetic Antisense oligonucleotide
  modified_base 1..2: mod_base = OTHER; note = bicyclic nucleic acid (BNA)
  modified_base 5: mod_base = OTHER; note = bicyclic nucleic acid (BNA)
  modified_base 8: mod_base = OTHER; note = bicyclic nucleic acid (BNA)
  modified_base 8: mod_base = OTHER; note = 5-methyl
  modified_base 12..13: mod_base = OTHER; note = 5-methyl
  modified_base 17..18: mod_base = OTHER; note = 5-methyl
  source 1..18: mol_type = other DNA
gtaagttctgtccaagcc

SEQ ID NO: 14450 - DNA, 18 bp, synthetic construct
  misc_feature 1..18: note = Description of Artificial Sequence: Synthetic Antisense oligonucleotide
  modified_base 1..2: mod_base = OTHER; note = bicyclic nucleic acid (BNA)
  modified_base 8: mod_base = OTHER; note = bicyclic nucleic acid (BNA)
  modified_base 13: mod_base = OTHER; note = bicyclic nucleic acid (BNA)
  modified_base 8: mod_base = OTHER; note = 5-methyl
  modified_base 12..13: mod_base = OTHER; note = 5-methyl
  modified_base 17..18: mod_base = OTHER; note = 5-methyl
  source 1..18: mol_type = other DNA
gtaagttctgtccaagcc

SEQ ID NO: 14451 - DNA, 18 bp, synthetic construct
  misc_feature 1..18: note = Description of Artificial Sequence: Synthetic Antisense oligonucleotide
  modified_base 1..2: mod_base = OTHER; note = bicyclic nucleic acid (BNA)
  modified_base 5: mod_base = OTHER; note = bicyclic nucleic acid (BNA)
  modified_base 13: mod_base = OTHER; note = bicyclic nucleic acid (BNA)
  modified_base 8: mod_base = OTHER; note = 5-methyl
  modified_base 12..13: mod_base = OTHER; note = 5-methyl
  modified_base 17..18: mod_base = OTHER; note = 5-methyl
  source 1..18: mol_type = other DNA
gtaagttctgtccaagcc

SEQ ID NO: 14452 - DNA, 18 bp, synthetic construct
  misc_feature 1..18: note = Description of Artificial Sequence: Synthetic Antisense oligonucleotide
  modified_base 1..2: mod_base = OTHER; note = bicyclic nucleic acid (BNA)
  modified_base 8: mod_base = OTHER; note = bicyclic nucleic acid (BNA)
  modified_base 17: mod_base = OTHER; note = bicyclic nucleic acid (BNA)
  modified_base 8: mod_base = OTHER; note = 5-methyl
  modified_base 12..13: mod_base = OTHER; note = 5-methyl
  modified_base 17..18: mod_base = OTHER; note = 5-methyl
  source 1..18: mol_type = other DNA
gtaagttctgtccaagcc

SEQ ID NO: 14453 - DNA, 18 bp, synthetic construct
  misc_feature 1..18: note = Description of Artificial Sequence: Synthetic Antisense oligonucleotide
  modified_base 1..2: mod_base = OTHER; note = bicyclic nucleic acid (BNA)
  modified_base 13: mod_base = OTHER; note = bicyclic nucleic acid (BNA)
  modified_base 17: mod_base = OTHER; note = bicyclic nucleic acid (BNA)
  modified_base 8: mod_base = OTHER; note = 5-methyl
  modified_base 12..13: mod_base = OTHER; note = 5-methyl
  modified_base 17..18: mod_base = OTHER; note = 5-methyl
  source 1..18: mol_type = other DNA
gtaagttctgtccaagcc

SEQ ID NO: 14454 - DNA, 18 bp, synthetic construct
  misc_feature 1..18: note = Description of Artificial Sequence: Synthetic Antisense oligonucleotide
  modified_base 1..2: mod_base = OTHER; note = bicyclic nucleic acid (BNA)
  modified_base 8: mod_base = OTHER; note = bicyclic nucleic acid (BNA)
  modified_base 12: mod_base = OTHER; note = bicyclic nucleic acid (BNA)
  modified_base 8: mod_base = OTHER; note = 5-methyl
  modified_base 12..13: mod_base = OTHER; note = 5-methyl
  modified_base 17..18: mod_base = OTHER; note = 5-methyl
  source 1..18: mol_type = other DNA
gtaagttctgtccaagcc

SEQ ID NO: 14455 - DNA, 18 bp, synthetic construct
  misc_feature 1..18: note = Description of Artificial Sequence: Synthetic Antisense oligonucleotide
  modified_base 1..2: mod_base = OTHER; note = bicyclic nucleic acid (BNA)
  modified_base 5: mod_base = OTHER; note = bicyclic nucleic acid (BNA)
  modified_base 10: mod_base = OTHER; note = bicyclic nucleic acid (BNA)
  modified_base 8: mod_base = OTHER; note = 5-methyl
  modified_base 12..13: mod_base = OTHER; note = 5-methyl
  modified_base 17..18: mod_base = OTHER; note = 5-methyl
  source 1..18: mol_type = other DNA
gtaagttctgtccaagcc

SEQ ID NO: 14456 - DNA, 18 bp, synthetic construct
  misc_feature 1..18: note = Description of Artificial Sequence: Synthetic Antisense oligonucleotide
  modified_base 1..2: mod_base = OTHER; note = bicyclic nucleic acid (BNA)
  modified_base 8: mod_base = OTHER; note = bicyclic nucleic acid (BNA)
  modified_base 16: mod_base = OTHER; note = bicyclic nucleic acid (BNA)
  modified_base 8: mod_base = OTHER; note = 5-methyl
  modified_base 12..13: mod_base = OTHER; note = 5-methyl
  modified_base 17..18: mod_base = OTHER; note = 5-methyl
  source 1..18: mol_type = other DNA
gtaagttctgtccaagcc

SEQ ID NO: 14457 - DNA, 18 bp, synthetic construct
  misc_feature 1..18: note = Description of Artificial Sequence: Synthetic Antisense oligonucleotide
  modified_base 1..2: mod_base = OTHER; note = bicyclic nucleic acid (BNA)
  modified_base 10: mod_base = OTHER; note = bicyclic nucleic acid (BNA)
  modified_base 16: mod_base = OTHER; note = bicyclic nucleic acid (BNA)
  modified_base 8: mod_base = OTHER; note = 5-methyl
  modified_base 12..13: mod_base = OTHER; note = 5-methyl
  modified_base 17..18: mod_base = OTHER; note = 5-methyl
  source 1..18: mol_type = other DNA
gtaagttctgtccaagcc

SEQ ID NO: 14458 - DNA, 18 bp, synthetic construct
  misc_feature 1..18: note = Description of Artificial Sequence: Synthetic Antisense oligonucleotide
  modified_base 1..2: mod_base = OTHER; note = bicyclic nucleic acid (BNA)
  modified_base 10: mod_base = OTHER; note = bicyclic nucleic acid (BNA)
  modified_base 12: mod_base = OTHER; note = bicyclic nucleic acid (BNA)
  modified_base 8: mod_base = OTHER; note = 5-methyl
  modified_base 12..13: mod_base = OTHER; note = 5-methyl
  modified_base 17..18: mod_base = OTHER; note = 5-methyl
  source 1..18: mol_type = other DNA
gtaagttctgtccaagcc

SEQ ID NO: 14459 - DNA, 18 bp, synthetic construct
  misc_feature 1..18: note = Description of Artificial Sequence: Synthetic Antisense oligonucleotide
  modified_base 1..2: mod_base = OTHER; note = bicyclic nucleic acid (BNA)
  modified_base 5: mod_base = OTHER; note = bicyclic nucleic acid (BNA)
  modified_base 17: mod_base = OTHER; note = bicyclic nucleic acid (BNA)
  modified_base 8: mod_base = OTHER; note = 5-methyl
  modified_base 12..13: mod_base = OTHER; note = 5-methyl
  modified_base 17..18: mod_base = OTHER; note = 5-methyl
  source 1..18: mol_type = other DNA
gtaagttctgtccaagcc

SEQ ID NO: 14460 - DNA, 18 bp, synthetic construct
  misc_feature 1..18: note = Description of Artificial Sequence: Synthetic Antisense oligonucleotide
  modified_base 1..2: mod_base = OTHER; note = bicyclic nucleic acid (BNA)
  modified_base 10: mod_base = OTHER; note = bicyclic nucleic acid (BNA)
  modified_base 17: mod_base = OTHER; note = bicyclic nucleic acid (BNA)
  modified_base 8: mod_base = OTHER; note = 5-methyl
  modified_base 12..13: mod_base = OTHER; note = 5-methyl
  modified_base 17..18: mod_base = OTHER; note = 5-methyl
  source 1..18: mol_type = other DNA
gtaagttctgtccaagcc

SEQ ID NO: 14461 - DNA, 18 bp, synthetic construct
  misc_feature 1..18: note = Description of Artificial Sequence: Synthetic Antisense oligonucleotide
  modified_base 1..2: mod_base = OTHER; note = bicyclic nucleic acid (BNA)
  modified_base 12..13: mod_base = OTHER; note = bicyclic nucleic acid (BNA)
  modified_base 8: mod_base = OTHER; note = 5-methyl
  modified_base 12..13: mod_base = OTHER; note = 5-methyl
  modified_base 17..18: mod_base = OTHER; note = 5-methyl
  source 1..18: mol_type = other DNA
gtaagttctgtccaagcc

SEQ ID NO: 14462 - DNA, 18 bp, synthetic construct
  misc_feature 1..18: note = Description of Artificial Sequence: Synthetic Antisense oligonucleotide
  modified_base 1..2: mod_base = OTHER; note = bicyclic nucleic acid (BNA)
  modified_base 5: mod_base = OTHER; note = bicyclic nucleic acid (BNA)
  modified_base 12: mod_base = OTHER; note = bicyclic nucleic acid (BNA)
  modified_base 8: mod_base = OTHER; note = 5-methyl
  modified_base 12..13: mod_base = OTHER; note = 5-methyl
  modified_base 17..18: mod_base = OTHER; note = 5-methyl
  source 1..18: mol_type = other DNA
gtaagttctgtccaagcc

SEQ ID NO: 14463 - DNA, 18 bp, synthetic construct
  misc_feature 1..18: note = Description of Artificial Sequence: Synthetic Antisense oligonucleotide
  modified_base 1..2: mod_base = OTHER; note = bicyclic nucleic acid (BNA)
  modified_base 8: mod_base = OTHER; note = bicyclic nucleic acid (BNA)
  modified_base 10: mod_base = OTHER; note = bicyclic nucleic acid (BNA)
  modified_base 8: mod_base = OTHER; note = 5-methyl
  modified_base 12..13: mod_base = OTHER; note = 5-methyl
  modified_base 17..18: mod_base = OTHER; note = 5-methyl
  source 1..18: mol_type = other DNA
gtaagttctgtccaagcc

SEQ ID NO: 14464 - DNA, 18 bp, synthetic construct
  misc_feature 1..18: note = Description of Artificial Sequence: Synthetic Antisense oligonucleotide
  modified_base 1..2: mod_base = OTHER; note = bicyclic nucleic acid (BNA)
  modified_base 13: mod_base = OTHER; note = bicyclic nucleic acid (BNA)
  modified_base 16: mod_base = OTHER; note = bicyclic nucleic acid (BNA)
  modified_base 8: mod_base = OTHER; note = 5-methyl
  modified_base 12..13: mod_base = OTHER; note = 5-methyl
  modified_base 17..18: mod_base = OTHER; note = 5-methyl
  source 1..18: mol_type = other DNA
gtaagttctgtccaagcc

SEQ ID NO: 14465 - DNA, 18 bp, synthetic construct
  misc_feature 1..18: note = Description of Artificial Sequence: Synthetic Antisense oligonucleotide
  modified_base 1..2: mod_base = OTHER; note = bicyclic nucleic acid (BNA)
  modified_base 5: mod_base = OTHER; note = bicyclic nucleic acid (BNA)
  modified_base 16: mod_base = OTHER; note = bicyclic nucleic acid (BNA)
  modified_base 8: mod_base = OTHER; note = 5-methyl
  modified_base 12..13: mod_base = OTHER; note = 5-methyl
  modified_base 17..18: mod_base = OTHER; note = 5-methyl
  source 1..18: mol_type = other DNA
gtaagttctgtccaagcc

SEQ ID NO: 14466 - DNA, 18 bp, synthetic construct
  misc_feature 1..18: note = Description of Artificial Sequence: Synthetic Antisense oligonucleotide
  modified_base 1..2: mod_base = OTHER; note = bicyclic nucleic acid (BNA)
  modified_base 12: mod_base = OTHER; note = bicyclic nucleic acid (BNA)
  modified_base 16: mod_base = OTHER; note = bicyclic nucleic acid (BNA)
  modified_base 8: mod_base = OTHER; note = 5-methyl
  modified_base 12..13: mod_base = OTHER; note = 5-methyl
  modified_base 17..18: mod_base = OTHER; note = 5-methyl
  source 1..18: mol_type = other DNA
gtaagttctgtccaagcc

SEQ ID NO: 14467 - DNA, 18 bp, synthetic construct
  misc_feature 1..18: note = Description of Artificial Sequence: Synthetic Antisense oligonucleotide
  modified_base 1..2: mod_base = OTHER; note = bicyclic nucleic acid (BNA)
  modified_base 16..17: mod_base = OTHER; note = bicyclic nucleic acid (BNA)
  modified_base 8: mod_base = OTHER; note = 5-methyl
  modified_base 12..13: mod_base = OTHER; note = 5-methyl
  modified_base 17..18: mod_base = OTHER; note = 5-methyl
  source 1..18: mol_type = other DNA
gtaagttctgtccaagcc

SEQ ID NO: 14468 - DNA, 18 bp, synthetic construct
  misc_feature 1..18: note = Description of Artificial Sequence: Synthetic Antisense oligonucleotide
  modified_base 1..2: mod_base = OTHER; note = bicyclic nucleic acid (BNA)
  modified_base 10: mod_base = OTHER; note = bicyclic nucleic acid (BNA)
  modified_base 13: mod_base = OTHER; note = bicyclic nucleic acid (BNA)
  modified_base 8: mod_base = OTHER; note = 5-methyl
  modified_base 12..13: mod_base = OTHER; note = 5-methyl
  modified_base 17..18: mod_base = OTHER; note = 5-methyl
  source 1..18: mol_type = other DNA
gtaagttctgtccaagcc

SEQ ID NO: 14469 - DNA, 18 bp, synthetic construct
  misc_feature 1..18: note = Description of Artificial Sequence: Synthetic Antisense oligonucleotide
  modified_base 1..2: mod_base = OTHER; note = bicyclic nucleic acid (BNA)
  modified_base 6: mod_base = OTHER; note = bicyclic nucleic acid (BNA)
  modified_base 10: mod_base = OTHER; note = bicyclic nucleic acid (BNA)
  modified_base 4: mod_base = OTHER; note = 5-methyl
  modified_base 13: mod_base = OTHER; note = 5-methyl
  modified_base 17..18: mod_base = OTHER; note = 5-methyl
  source 1..18: mol_type = other DNA
agtcggtaagttctgtcc

SEQ ID NO: 14470 - DNA, 18 bp, synthetic construct
  misc_feature 1..18: note = Description of Artificial Sequence: Synthetic Antisense oligonucleotide
  modified_base 1..2: mod_base = OTHER; note = bicyclic nucleic acid (BNA)
  modified_base 5: mod_base = OTHER; note = bicyclic nucleic acid (BNA)
  modified_base 13: mod_base = OTHER; note = bicyclic nucleic acid (BNA)
  modified_base 4: mod_base = OTHER; note = 5-methyl
  modified_base 13: mod_base = OTHER; note = 5-methyl
  modified_base 17..18: mod_base = OTHER; note = 5-methyl
  source 1..18: mol_type = other DNA
agtcggtaagttctgtcc

SEQ ID NO: 14471 - DNA, 18 bp, synthetic construct
  misc_feature 1..18: note = Description of Artificial Sequence: Synthetic Antisense oligonucleotide
  modified_base 1..2: mod_base = OTHER; note = bicyclic nucleic acid (BNA)
  modified_base 13: mod_base = OTHER; note = bicyclic nucleic acid (BNA)
  modified_base 17: mod_base = OTHER; note = bicyclic nucleic acid (BNA)
  modified_base 4: mod_base = OTHER; note = 5-methyl
  modified_base 13: mod_base = OTHER; note = 5-methyl
  modified_base 17..18: mod_base = OTHER; note = 5-methyl
  source 1..18: mol_type = other DNA
agtcggtaagttctgtcc

SEQ ID NO: 14472 - DNA, 18 bp, synthetic construct
  misc_feature 1..18: note = Description of Artificial Sequence: Synthetic Antisense oligonucleotide
  modified_base 1..2: mod_base = OTHER; note = bicyclic nucleic acid (BNA)
  modified_base 4: mod_base = OTHER; note = bicyclic nucleic acid (BNA)
  modified_base 15: mod_base = OTHER; note = bicyclic nucleic acid (BNA)
  modified_base 4: mod_base = OTHER; note = 5-methyl
  modified_base 13: mod_base = OTHER; note = 5-methyl
  modified_base 17..18: mod_base = OTHER; note = 5-methyl
  source 1..18: mol_type = other DNA
agtcggtaagttctgtcc

SEQ ID NO: 14473 - DNA, 18 bp, synthetic construct
  misc_feature 1..18: note = Description of Artificial Sequence: Synthetic Antisense oligonucleotide
  modified_base 1..2: mod_base = OTHER; note = bicyclic nucleic acid (BNA)
  modified_base 5: mod_base = OTHER; note = bicyclic nucleic acid (BNA)
  modified_base 10: mod_base = OTHER; note = bicyclic nucleic acid (BNA)
  modified_base 4: mod_base = OTHER; note = 5-methyl
  modified_base 13: mod_base = OTHER; note = 5-methyl
  modified_base 17..18: mod_base = OTHER; note = 5-methyl
  source 1..18: mol_type = other DNA
agtcggtaagttctgtcc

SEQ ID NO: 14474 - DNA, 18 bp, synthetic construct
  misc_feature 1..18: note = Description of Artificial Sequence: Synthetic Antisense oligonucleotide
  modified_base 1..2: mod_base = OTHER; note = bicyclic nucleic acid (BNA)
  modified_base 6: mod_base = OTHER; note = bicyclic nucleic acid (BNA)
  modified_base 13: mod_base = OTHER; note = bicyclic nucleic acid (BNA)
  modified_base 4: mod_base = OTHER; note = 5-methyl
  modified_base 13: mod_base = OTHER; note = 5-methyl
  modified_base 17..18: mod_base = OTHER; note = 5-methyl
  source 1..18: mol_type = other DNA
agtcggtaagttctgtcc

SEQ ID NO: 14475 - DNA, 18 bp, synthetic construct
  misc_feature 1..18: note = Description of Artificial Sequence: Synthetic Antisense oligonucleotide
  modified_base 1..2: mod_base = OTHER; note = bicyclic nucleic acid (BNA)
  modified_base 4: mod_base = OTHER; note = bicyclic nucleic acid (BNA)
  modified_base 17: mod_base = OTHER; note = bicyclic nucleic acid (BNA)
  modified_base 4: mod_base = OTHER; note = 5-methyl
  modified_base 13: mod_base = OTHER; note = 5-methyl
  modified_base 17..18: mod_base = OTHER; note = 5-methyl
  source 1..18: mol_type = other DNA
agtcggtaagttctgtcc

SEQ ID NO: 14476 - DNA, 18 bp, synthetic construct
  misc_feature 1..18: note = Description of Artificial Sequence: Synthetic Antisense oligonucleotide
  modified_base 1..2: mod_base = OTHER; note = bicyclic nucleic acid (BNA)
  modified_base 10: mod_base = OTHER; note = bicyclic nucleic acid (BNA)
  modified_base 15: mod_base = OTHER; note = bicyclic nucleic acid (BNA)
  modified_base 4: mod_base = OTHER; note = 5-methyl
  modified_base 13: mod_base = OTHER; note = 5-methyl
  modified_base 17..18: mod_base = OTHER; note = 5-methyl
  source 1..18: mol_type = other DNA
agtcggtaagttctgtcc

SEQ ID NO: 14477 - DNA, 18 bp, synthetic construct
  misc_feature 1..18: note = Description of Artificial Sequence: Synthetic Antisense oligonucleotide
  modified_base 1..2: mod_base = OTHER; note = bicyclic nucleic acid (BNA)
  modified_base 13: mod_base = OTHER; note = bicyclic nucleic acid (BNA)
  modified_base 15: mod_base = OTHER; note = bicyclic nucleic acid (BNA)
  modified_base 4: mod_base = OTHER; note = 5-methyl
  modified_base 13: mod_base = OTHER; note = 5-methyl
  modified_base 17..18: mod_base = OTHER; note = 5-methyl
  source 1..18: mol_type = other DNA
agtcggtaagttctgtcc

SEQ ID NO: 14478 - DNA, 18 bp, synthetic construct
  misc_feature 1..18: note = Description of Artificial Sequence: Synthetic Antisense oligonucleotide
  modified_base 1..2: mod_base = OTHER; note = bicyclic nucleic acid (BNA)
  modified_base 5..6: mod_base = OTHER; note = bicyclic nucleic acid (BNA)
  modified_base 4: mod_base = OTHER; note = 5-methyl
  modified_base 13: mod_base = OTHER; note = 5-methyl
  modified_base 17..18: mod_base = OTHER; note = 5-methyl
  source 1..18: mol_type = other DNA
agtcggtaagttctgtcc

SEQ ID NO: 14479 - DNA, 18 bp, synthetic construct
  misc_feature 1..18: note = Description of Artificial Sequence: Synthetic Antisense oligonucleotide
  modified_base 1..2: mod_base = OTHER; note = bicyclic nucleic acid (BNA)
  modified_base 5: mod_base = OTHER; note = bicyclic nucleic acid (BNA)
  modified_base 15: mod_base = OTHER; note = bicyclic nucleic acid (BNA)
  modified_base 4: mod_base = OTHER; note = 5-methyl
  modified_base 13: mod_base = OTHER; note = 5-methyl
  modified_base 17..18: mod_base = OTHER; note = 5-methyl
  source 1..18: mol_type = other DNA
agtcggtaagttctgtcc

SEQ ID NO: 14480 - DNA, 18 bp, synthetic construct
  misc_feature 1..18: note = Description of Artificial Sequence: Synthetic Antisense oligonucleotide
  modified_base 1..2: mod_base = OTHER; note = bicyclic nucleic acid (BNA)
  modified_base 5: mod_base = OTHER; note = bicyclic nucleic acid (BNA)
  modified_base 17: mod_base = OTHER; note = bicyclic nucleic acid (BNA)
  modified_base 4: mod_base = OTHER; note = 5-methyl
  modified_base 13: mod_base = OTHER; note = 5-methyl
  modified_base 17..18: mod_base = OTHER; note = 5-methyl
  source 1..18: mol_type = other DNA
agtcggtaagttctgtcc

SEQ ID NO: 14481 - DNA, 18 bp, synthetic construct
  misc_feature 1..18: note = Description of Artificial Sequence: Synthetic Antisense oligonucleotide
  modified_base 1..2: mod_base = OTHER; note = bicyclic nucleic acid (BNA)
  modified_base 10: mod_base = OTHER; note = bicyclic nucleic acid (BNA)
  modified_base 17: mod_base = OTHER; note = bicyclic nucleic acid (BNA)
  modified_base 4: mod_base = OTHER; note = 5-methyl
  modified_base 13: mod_base = OTHER; note = 5-methyl
  modified_base 17..18: mod_base = OTHER; note = 5-methyl
  source 1..18: mol_type = other DNA
agtcggtaagttctgtcc

SEQ ID NO: 14482 - DNA, 18 bp, synthetic construct
  misc_feature 1..18: note = Description of Artificial Sequence: Synthetic Antisense oligonucleotide
  modified_base 1..2: mod_base = OTHER; note = bicyclic nucleic acid (BNA)
  modified_base 4: mod_base = OTHER; note = bicyclic nucleic acid (BNA)
  modified_base 10: mod_base = OTHER; note = bicyclic nucleic acid (BNA)
  modified_base 4: mod_base = OTHER; note = 5-methyl
  modified_base 13: mod_base = OTHER; note = 5-methyl
  modified_base 17..18: mod_base = OTHER; note = 5-methyl
  source 1..18: mol_type = other DNA
agtcggtaagttctgtcc

SEQ ID NO: 14483 - DNA, 18 bp, synthetic construct
  misc_feature 1..18: note = Description of Artificial Sequence: Synthetic Antisense oligonucleotide
  modified_base 1..2: mod_base = OTHER; note = bicyclic nucleic acid (BNA)
  modified_base 4: mod_base = OTHER; note = bicyclic nucleic acid (BNA)
  modified_base 6: mod_base = OTHER; note = bicyclic nucleic acid (BNA)
  modified_base 4: mod_base = OTHER; note = 5-methyl
  modified_base 13: mod_base = OTHER; note = 5-methyl
  modified_base 17..18: mod_base = OTHER; note = 5-methyl
  source 1..18: mol_type = other DNA
agtcggtaagttctgtcc

SEQ ID NO: 14484 - DNA, 18 bp, synthetic construct
  misc_feature 1..18: note = Description of Artificial Sequence: Synthetic Antisense oligonucleotide
  modified_base 1..2: mod_base = OTHER; note = bicyclic nucleic acid (BNA)
  modified_base 4: mod_base = OTHER; note = bicyclic nucleic acid (BNA)
  modified_base 13: mod_base = OTHER; note = bicyclic nucleic acid (BNA)
  modified_base 4: mod_base = OTHER; note = 5-methyl
  modified_base 13: mod_base = OTHER; note = 5-methyl
  modified_base 17..18: mod_base = OTHER; note = 5-methyl
  source 1..18: mol_type = other DNA
agtcggtaagttctgtcc

SEQ ID NO: 14485 - DNA, 18 bp, synthetic construct
  misc_feature 1..18: note = Description of Artificial Sequence: Synthetic Antisense oligonucleotide
  modified_base 1..2: mod_base = OTHER; note = bicyclic nucleic acid (BNA)
  modified_base 15: mod_base = OTHER; note = bicyclic nucleic acid (BNA)
  modified_base 17: mod_base = OTHER; note = bicyclic nucleic acid (BNA)
  modified_base 4: mod_base = OTHER; note = 5-methyl
  modified_base 13: mod_base = OTHER; note = 5-methyl
  modified_base 17..18: mod_base = OTHER; note = 5-methyl
  source 1..18: mol_type = other DNA
agtcggtaagttctgtcc

SEQ ID NO: 14486 - DNA, 18 bp, synthetic construct
  misc_feature 1..18: note = Description of Artificial Sequence: Synthetic Antisense oligonucleotide
  modified_base 1..2: mod_base = OTHER; note = bicyclic nucleic acid (BNA)
  modified_base 6: mod_base = OTHER; note = bicyclic nucleic acid (BNA)
  modified_base 17: mod_base = OTHER; note = bicyclic nucleic acid (BNA)
  modified_base 4: mod_base = OTHER; note = 5-methyl
  modified_base 13: mod_base = OTHER; note = 5-methyl
  modified_base 17..18: mod_base = OTHER; note = 5-methyl
  source 1..18: mol_type = other DNA
agtcggtaagttctgtcc

SEQ ID NO: 14487 - DNA, 18 bp, synthetic construct
  misc_feature 1..18: note = Description of Artificial Sequence: Synthetic Antisense oligonucleotide
  modified_base 1..2: mod_base = OTHER; note = bicyclic nucleic acid (BNA)
  modified_base 6: mod_base = OTHER; note = bicyclic nucleic acid (BNA)
  modified_base 15: mod_base = OTHER; note = bicyclic nucleic acid (BNA)
  modified_base 4: mod_base = OTHER; note = 5-methyl
  modified_base 13: mod_base = OTHER; note = 5-methyl
  modified_base 17..18: mod_base = OTHER; note = 5-methyl
  source 1..18: mol_type = other DNA
agtcggtaagttctgtcc

SEQ ID NO: 14488 - DNA, 18 bp, synthetic construct
  misc_feature 1..18: note = Description of Artificial Sequence: Synthetic Antisense oligonucleotide
  modified_base 1..2: mod_base = OTHER; note = bicyclic nucleic acid (BNA)
  modified_base 4..5: mod_base = OTHER; note = bicyclic nucleic acid (BNA)
  modified_base 4: mod_base = OTHER; note = 5-methyl
  modified_base 13: mod_base = OTHER; note = 5-methyl
  modified_base 17..18: mod_base = OTHER; note = 5-methyl
  source 1..18: mol_type = other DNA
agtcggtaagttctgtcc

SEQ ID NO: 14489 - DNA, 18 bp, synthetic construct
  misc_feature 1..18: note = Description of Artificial Sequence: Synthetic Antisense oligonucleotide
  modified_base 1..2: mod_base = OTHER; note = bicyclic nucleic acid (BNA)
  modified_base 10: mod_base = OTHER; note = bicyclic nucleic acid (BNA)
  modified_base 13: mod_base = OTHER; note = bicyclic nucleic acid (BNA)
  modified_base 4: mod_base = OTHER; note = 5-methyl
  modified_base 13: mod_base = OTHER; note = 5-methyl
  modified_base 17..18: mod_base = OTHER; note = 5-methyl
  source 1..18: mol_type = other DNA
agtcggtaagttctgtcc

SEQ ID NO: 14490 - DNA, 18 bp, synthetic construct
  misc_feature 1..18: note = Description of Artificial Sequence: Synthetic Antisense oligonucleotide
  modified_base 1: mod_base = OTHER; note = 5-methyl
  modified_base 5..6: mod_base = OTHER; note = 5-methyl
  modified_base 10..12: mod_base = OTHER; note = 5-methyl
  modified_base 1..2: mod_base = OTHER; note = bicyclic nucleic acid (BNA)
  modified_base 12: mod_base = OTHER; note = bicyclic nucleic acid (BNA)
  modified_base 17: mod_base = OTHER; note = bicyclic nucleic acid (BNA)
  source 1..18: mol_type = other DNA
ctgtccaagcccggttga

SEQ ID NO: 14491 - DNA, 18 bp, synthetic construct
  misc_feature 1..18: note = Description of Artificial Sequence: Synthetic Antisense oligonucleotide
  modified_base 1: mod_base = OTHER; note = 5-methyl
  modified_base 5..6: mod_base = OTHER; note = 5-methyl
  modified_base 10..12: mod_base = OTHER; note = 5-methyl
  modified_base 1..2: mod_base = OTHER; note = bicyclic nucleic acid (BNA)
  modified_base 6: mod_base = OTHER; note = bicyclic nucleic acid (BNA)
  modified_base 10: mod_base = OTHER; note = bicyclic nucleic acid (BNA)
  source 1..18: mol_type = other DNA
ctgtccaagcccggttga

SEQ ID NO: 14492 - DNA, 18 bp, synthetic construct
  misc_feature 1..18: note = Description of Artificial Sequence: Synthetic Antisense oligonucleotide
  modified_base 1: mod_base = OTHER; note = 5-methyl
  modified_base 5..6: mod_base = OTHER; note = 5-methyl
  modified_base 10..12: mod_base = OTHER; note = 5-methyl
  modified_base 1..2: mod_base = OTHER; note = bicyclic nucleic acid (BNA)
  modified_base 9: mod_base = OTHER; note = bicyclic nucleic acid (BNA)
  modified_base 14: mod_base = OTHER; note = bicyclic nucleic acid (BNA)
  source 1..18: mol_type = other DNA
ctgtccaagcccggttga

SEQ ID NO: 14493 - DNA, 18 bp, synthetic construct
  misc_feature 1..18: note = Description of Artificial Sequence: Synthetic Antisense oligonucleotide
  modified_base 1: mod_base = OTHER; note = 5-methyl
  modified_base 5..6: mod_base = OTHER; note = 5-methyl
  modified_base 10..12: mod_base = OTHER; note = 5-methyl
  modified_base 1..2: mod_base = OTHER; note = bicyclic nucleic acid (BNA)
  modified_base 11..12: mod_base = OTHER; note = bicyclic nucleic acid (BNA)
  source 1..18: mol_type = other DNA
ctgtccaagcccggttga

SEQ ID NO: 14494 - DNA, 18 bp, synthetic construct
  misc_feature 1..18: note = Description of Artificial Sequence: Synthetic Antisense oligonucleotide
  modified_base 1: mod_base = OTHER; note = 5-methyl
  modified_base 5..6: mod_base = OTHER; note = 5-methyl
  modified_base 10..12: mod_base = OTHER; note = 5-methyl
  modified_base 1..2: mod_base = OTHER; note = bicyclic nucleic acid (BNA)
  modified_base 5: mod_base = OTHER; note = bicyclic nucleic acid (BNA)
  modified_base 9: mod_base = OTHER; note = bicyclic nucleic acid (BNA)
  source 1..18: mol_type = other DNA
ctgtccaagcccggttga

SEQ ID NO: 14495 - DNA, 18 bp, synthetic construct
  misc_feature 1..18: note = Description of Artificial Sequence: Synthetic Antisense oligonucleotide
  modified_base 1: mod_base = OTHER; note = 5-methyl
  modified_base 5..6: mod_base = OTHER; note = 5-methyl
  modified_base 10..12: mod_base = OTHER; note = 5-methyl
  modified_base 1..3: mod_base = OTHER; note = bicyclic nucleic acid (BNA)
  modified_base 9: mod_base = OTHER; note = bicyclic nucleic acid (BNA)
  source 1..18: mol_type = other DNA
ctgtccaagcccggttga

SEQ ID NO: 14496 - DNA, 18 bp, synthetic construct
  misc_feature 1..18: note = Description of Artificial Sequence: Synthetic Antisense oligonucleotide
  modified_base 1: mod_base = OTHER; note = 5-methyl
  modified_base 5..6: mod_base = OTHER; note = 5-methyl
  modified_base 10..12: mod_base = OTHER; note = 5-methyl
  modified_base 1..2: mod_base = OTHER; note = bicyclic nucleic acid (BNA)
  modified_base 6: mod_base = OTHER; note = bicyclic nucleic acid (BNA)
  modified_base 14: mod_base = OTHER; note = bicyclic nucleic acid (BNA)
  source 1..18: mol_type = other DNA
ctgtccaagcccggttga

SEQ ID NO: 14497 - DNA, 18 bp, synthetic construct
  misc_feature 1..18: note = Description of Artificial Sequence: Synthetic Antisense oligonucleotide
  modified_base 1: mod_base = OTHER; note = 5-methyl
  modified_base 5..6: mod_base = OTHER; note = 5-methyl
  modified_base 10..12: mod_base = OTHER; note = 5-methyl
  modified_base 1..2: mod_base = OTHER; note = bicyclic nucleic acid (BNA)
  modified_base 9..10: mod_base = OTHER; note = bicyclic nucleic acid (BNA)
  source 1..18: mol_type = other DNA
ctgtccaagcccggttga

SEQ ID NO: 14498 - DNA, 18 bp, synthetic construct
  misc_feature 1..18: note = Description of Artificial Sequence: Synthetic Antisense oligonucleotide
  modified_base 1: mod_base = OTHER; note = 5-methyl
  modified_base 5..6: mod_base = OTHER; note = 5-methyl
  modified_base 10..12: mod_base = OTHER; note = 5-methyl
  modified_base 1..2: mod_base = OTHER; note = bicyclic nucleic acid (BNA)
  modified_base 5: mod_base = OTHER; note = bicyclic nucleic acid (BNA)
  modified_base 13: mod_base = OTHER; note = bicyclic nucleic acid (BNA)
  source 1..18: mol_type = other DNA
ctgtccaagcccggttga

SEQ ID NO: 14499 - DNA, 18 bp, synthetic construct
  misc_feature 1..18: note = Description of Artificial Sequence: Synthetic Antisense oligonucleotide
  modified_base 1: mod_base = OTHER; note = 5-methyl
  modified_base 5..6: mod_base = OTHER; note = 5-methyl
  modified_base 10..12: mod_base = OTHER; note = 5-methyl
  modified_base 1..3: mod_base = OTHER; note = bicyclic nucleic acid (BNA)
  modified_base 13: mod_base = OTHER; note = bicyclic nucleic acid (BNA)
  source 1..18: mol_type = other DNA
ctgtccaagcccggttga

SEQ ID NO: 14500 - DNA, 18 bp, synthetic construct
  misc_feature 1..18: note = Description of Artificial Sequence: Synthetic Antisense oligonucleotide
  modified_base 1: mod_base = OTHER; note = 5-methyl
  modified_base 5..6: mod_base = OTHER; note = 5-methyl
  modified_base 10..12: mod_base = OTHER; note = 5-methyl
  modified_base 1..2: mod_base = OTHER; note = bicyclic nucleic acid (BNA)
  modified_base 13: mod_base = OTHER; note = bicyclic nucleic acid (BNA)
  modified_base 17: mod_base = OTHER; note = bicyclic nucleic acid (BNA)
  source 1..18: mol_type = other DNA
ctgtccaagcccggttga

SEQ ID NO: 14501 - DNA, 18 bp, synthetic construct
  misc_feature 1..18: note = Description of Artificial Sequence: Synthetic Antisense oligonucleotide
  modified_base 1: mod_base = OTHER; note = 5-methyl
  modified_base 5..6: mod_base = OTHER; note = 5-methyl
  modified_base 10..12: mod_base = OTHER; note = 5-methyl
  modified_base 1..3: mod_base = OTHER; note = bicyclic nucleic acid (BNA)
  modified_base 6: mod_base = OTHER; note = bicyclic nucleic acid (BNA)
  source 1..18: mol_type = other DNA
ctgtccaagcccggttga

SEQ ID NO: 14502 - DNA, 18 bp, synthetic construct
  misc_feature 1..18: note = Description of Artificial Sequence: Synthetic Antisense oligonucleotide
  modified_base 1: mod_base = OTHER; note = 5-methyl
  modified_base 5..6: mod_base = OTHER; note = 5-methyl
  modified_base 10..12: mod_base = OTHER; note = 5-methyl
  modified_base 1..2: mod_base = OTHER; note = bicyclic nucleic acid (BNA)
  modified_base 6: mod_base = OTHER; note = bicyclic nucleic acid (BNA)
  modified_base 9: mod_base = OTHER; note = bicyclic nucleic acid (BNA)
  source 1..18: mol_type = other DNA
ctgtccaagcccggttga

SEQ ID NO: 14503 - DNA, 18 bp, synthetic construct
  misc_feature 1..18: note = Description of Artificial Sequence: Synthetic Antisense oligonucleotide
  modified_base 1: mod_base = OTHER; note = 5-methyl
  modified_base 5..6: mod_base = OTHER; note = 5-methyl
  modified_base 10..12: mod_base = OTHER; note = 5-methyl
  modified_base 1..2: mod_base = OTHER; note = bicyclic nucleic acid (BNA)
  modified_base 5: mod_base = OTHER; note = bicyclic nucleic acid (BNA)
  modified_base 10: mod_base = OTHER; note = bicyclic nucleic acid (BNA)
  source 1..18: mol_type = other DNA
ctgtccaagcccggttga

SEQ ID NO: 14504 - DNA, 18 bp, synthetic construct
  misc_feature 1..18: note = Description of Artificial Sequence: Synthetic Antisense oligonucleotide
  modified_base 1: mod_base = OTHER; note = 5-methyl
  modified_base 5..6: mod_base = OTHER; note = 5-methyl
  modified_base 10..12: mod_base = OTHER; note = 5-methyl
  modified_base 1..3: mod_base = OTHER; note = bicyclic nucleic acid (BNA)
  modified_base 10: mod_base = OTHER; note = bicyclic nucleic acid (BNA)
  source 1..18: mol_type = other DNA
ctgtccaagcccggttga

SEQ ID NO: 14505 - DNA, 18 bp, synthetic construct
  misc_feature 1..18: note = Description of Artificial Sequence: Synthetic Antisense oligonucleotide
  modified_base 1: mod_base = OTHER; note = 5-methyl
  modified_base 5..6: mod_base = OTHER; note = 5-methyl
  modified_base 10..12: mod_base = OTHER; note = 5-methyl
  modified_base 1..2: mod_base = OTHER; note = bicyclic nucleic acid (BNA)
  modified_base 13..14: mod_base = OTHER; note = bicyclic nucleic acid (BNA)
  source 1..18: mol_type = other DNA
ctgtccaagcccggttga

SEQ ID NO: 14506 - DNA, 18 bp, synthetic construct
  misc_feature 1..18: note = Description of Artificial Sequence: Synthetic Antisense oligonucleotide
  modified_base 1: mod_base = OTHER; note = 5-methyl
  modified_base 5..6: mod_base = OTHER; note = 5-methyl
  modified_base 10..12: mod_base = OTHER; note = 5-methyl
  modified_base 1..2: mod_base = OTHER; note = bicyclic nucleic acid (BNA)
  modified_base 6: mod_base = OTHER; note = bicyclic nucleic acid (BNA)
  modified_base 13: mod_base = OTHER; note = bicyclic nucleic acid (BNA)
  source 1..18: mol_type = other DNA
ctgtccaagcccggttga

SEQ ID NO: 14507 - DNA, 18 bp, synthetic construct
  misc_feature 1..18: note = Description of Artificial Sequence: Synthetic Antisense oligonucleotide
  modified_base 1: mod_base = OTHER; note = 5-methyl
  modified_base 5..6: mod_base = OTHER; note = 5-methyl
  modified_base 10..12: mod_base = OTHER; note = 5-methyl
  modified_base 1..2: mod_base = OTHER; note = bicyclic nucleic acid (BNA)
  modified_base 9: mod_base = OTHER; note = bicyclic nucleic acid (BNA)
  modified_base 11: mod_base = OTHER; note = bicyclic nucleic acid (BNA)
  source 1..18: mol_type = other DNA
ctgtccaagcccggttga

SEQ ID NO: 14508 - DNA, 18 bp, synthetic construct
  misc_feature 1..18: note = Description of Artificial Sequence: Synthetic Antisense oligonucleotide
  modified_base 1: mod_base = OTHER; note = 5-methyl
  modified_base 5..6: mod_base = OTHER; note = 5-methyl
  modified_base 10..12: mod_base = OTHER; note = 5-methyl
  modified_base 1..2: mod_base = OTHER; note = bicyclic nucleic acid (BNA)
  modified_base 14: mod_base = OTHER; note = bicyclic nucleic acid (BNA)
  modified_base 17: mod_base = OTHER; note = bicyclic nucleic acid (BNA)
  source 1..18: mol_type = other DNA
ctgtccaagcccggttga

SEQ ID NO: 14509 - DNA, 18 bp, synthetic construct
  misc_feature 1..18: note = Description of Artificial Sequence: Synthetic Antisense oligonucleotide
  modified_base 1: mod_base = OTHER; note = 5-methyl
  modified_base 5..6: mod_base = OTHER; note = 5-methyl
  modified_base 10..12: mod_base = OTHER; note = 5-methyl
  modified_base 1..2: mod_base = OTHER; note = bicyclic nucleic acid (BNA)
  modified_base 11: mod_base = OTHER; note = bicyclic nucleic acid (BNA)
  modified_base 13: mod_base = OTHER; note = bicyclic nucleic acid (BNA)
  source 1..18: mol_type = other DNA
ctgtccaagcccggttga

SEQ ID NO: 14510 - DNA, 18 bp, synthetic construct
  misc_feature 1..18: note = Description of Artificial Sequence: Synthetic Antisense oligonucleotide
  modified_base 1: mod_base = OTHER; note = 5-methyl
  modified_base 5..6: mod_base = OTHER; note = 5-methyl
  modified_base 10..12: mod_base = OTHER; note = 5-methyl
  modified_base 1..2: mod_base = OTHER; note = bicyclic nucleic acid (BNA)
  modified_base 5: mod_base = OTHER; note = bicyclic nucleic acid (BNA)
  modified_base 14: mod_base = OTHER; note = bicyclic nucleic acid (BNA)
  source 1..18: mol_type = other DNA
ctgtccaagcccggttga

SEQ ID NO: 14511 - DNA, 18 bp, synthetic construct
  misc_feature 1..18: note = Description of Artificial Sequence: Synthetic Antisense oligonucleotide
  modified_base 1: mod_base = OTHER; note = 5-methyl
  modified_base 5..6: mod_base = OTHER; note = 5-methyl
  modified_base 10..12: mod_base = OTHER; note = 5-methyl
  modified_base 1..3: mod_base = OTHER; note = bicyclic nucleic acid (BNA)
  modified_base 14: mod_base = OTHER; note = bicyclic nucleic acid (BNA)
  source 1..18: mol_type = other DNA
ctgtccaagcccggttga

SEQ ID NO: 14512 - DNA, 18 bp, synthetic construct
  misc_feature 1..18: note = Description of Artificial Sequence: Synthetic Antisense oligonucleotide
  modified_base 1: mod_base = OTHER; note = 5-methyl
  modified_base 5..6: mod_base = OTHER; note = 5-methyl
  modified_base 10..12: mod_base = OTHER; note = 5-methyl
  modified_base 1..2: mod_base = OTHER; note = bicyclic nucleic acid (BNA)
  modified_base 10: mod_base = OTHER; note = bicyclic nucleic acid (BNA)
  modified_base 12: mod_base = OTHER; note = bicyclic nucleic acid (BNA)
  source 1..18: mol_type = other DNA
ctgtccaagcccggttga

SEQ ID NO: 14513 - DNA, 18 bp, synthetic construct
  misc_feature 1..18: note = Description of Artificial Sequence: Synthetic Antisense oligonucleotide
  modified_base 1: mod_base = OTHER; note = 5-methyl
  modified_base 5..6: mod_base = OTHER; note = 5-methyl
  modified_base 10..12: mod_base = OTHER; note = 5-methyl
  modified_base 1..2: mod_base = OTHER; note = bicyclic nucleic acid (BNA)
  modified_base 9: mod_base = OTHER; note = bicyclic nucleic acid (BNA)
  modified_base 17: mod_base = OTHER; note = bicyclic nucleic acid (BNA)
  source 1..18: mol_type = other DNA
ctgtccaagcccggttga

SEQ ID NO: 14514 - DNA, 18 bp, synthetic construct
  misc_feature 1..18: note = Description of Artificial Sequence: Synthetic Antisense oligonucleotide
  modified_base 1: mod_base = OTHER; note = 5-methyl
  modified_base 5..6: mod_base = OTHER; note = 5-methyl
  modified_base 10..12: mod_base = OTHER; note = 5-methyl
  modified_base 1..2: mod_base = OTHER; note = bicyclic nucleic acid (BNA)
  modified_base 12: mod_base = OTHER; note = bicyclic nucleic acid (BNA)
  modified_base 14: mod_base = OTHER; note = bicyclic nucleic acid (BNA)
  source 1..18: mol_type = other DNA
ctgtccaagcccggttga

SEQ ID NO: 14515 - DNA, 18 bp, synthetic construct
  misc_feature 1..18: note = Description of Artificial Sequence: Synthetic Antisense oligonucleotide
  modified_base 1: mod_base = OTHER; note = 5-methyl
  modified_base 5..6: mod_base = OTHER; note = 5-methyl
  modified_base 10..12: mod_base = OTHER; note = 5-methyl
  modified_base 1..2: mod_base = OTHER; note = bicyclic nucleic acid (BNA)
  modified_base 5: mod_base = OTHER; note = bicyclic nucleic acid (BNA)
  modified_base 11: mod_base = OTHER; note = bicyclic nucleic acid (BNA)
  source 1..18: mol_type = other DNA
ctgtccaagcccggttga

SEQ ID NO: 14516 - DNA, 18 bp, synthetic construct
  misc_feature 1..18: note = Description of Artificial Sequence: Synthetic Antisense oligonucleotide
  modified_base 1: mod_base = OTHER; note = 5-methyl
  modified_base 5..6: mod_base = OTHER; note = 5-methyl
  modified_base 10..12: mod_base = OTHER; note = 5-methyl
  modified_base 1..3: mod_base = OTHER; note = bicyclic nucleic acid (BNA)
  modified_base 17: mod_base = OTHER; note = bicyclic nucleic acid (BNA)
  source 1..18: mol_type = other DNA
ctgtccaagcccggttga

SEQ ID NO: 14517 - DNA, 18 bp, synthetic construct
  misc_feature 1..18: note = Description of Artificial Sequence: Synthetic Antisense oligonucleotide
  modified_base 1: mod_base = OTHER; note = 5-methyl
  modified_base 5..6: mod_base = OTHER; note = 5-methyl
  modified_base 10..12: mod_base = OTHER; note = 5-methyl
  modified_base 1..2: mod_base = OTHER; note = bicyclic nucleic acid (BNA)
  modified_base 6: mod_base = OTHER; note = bicyclic nucleic acid (BNA)
  modified_base 12: mod_base = OTHER; note = bicyclic nucleic acid (BNA)
  source 1..18: mol_type = other DNA
ctgtccaagcccggttga

SEQ ID NO: 14518 - DNA, 18 bp, synthetic construct
  misc_feature 1..18: note = Description of Artificial Sequence: Synthetic Antisense oligonucleotide
  modified_base 1: mod_base = OTHER; note = 5-methyl
  modified_base 5..6: mod_base = OTHER; note = 5-methyl
  modified_base 10..12: mod_base = OTHER; note = 5-methyl
  modified_base 1..2: mod_base = OTHER; note = bicyclic nucleic acid (BNA)
  modified_base 5..6: mod_base = OTHER; note = bicyclic nucleic acid (BNA)
  source 1..18: mol_type = other DNA
ctgtccaagcccggttga

SEQ ID NO: 14519 - DNA, 18 bp, synthetic construct
  misc_feature 1..18: note = Description of Artificial Sequence: Synthetic Antisense oligonucleotide
  modified_base 1: mod_base = OTHER; note = 5-methyl
  modified_base 5..6: mod_base = OTHER; note = 5-methyl
  modified_base 10..12: mod_base = OTHER; note = 5-methyl
  modified_base 1..2: mod_base = OTHER; note = bicyclic nucleic acid (BNA)
  modified_base 11: mod_base = OTHER; note = bicyclic nucleic acid (BNA)
  modified_base 14: mod_base = OTHER; note = bicyclic nucleic acid (BNA)
  source 1..18: mol_type = other DNA
ctgtccaagcccggttga

SEQ ID NO: 14520 - DNA, 18 bp, synthetic construct
  misc_feature 1..18: note = Description of Artificial Sequence: Synthetic Antisense oligonucleotide
  modified_base 1: mod_base = OTHER; note = 5-methyl
  modified_base 5..6: mod_base = OTHER; note = 5-methyl
  modified_base 10..12: mod_base = OTHER; note = 5-methyl
  modified_base 1..2: mod_base = OTHER; note = bicyclic nucleic acid (BNA)
  modified_base 9: mod_base = OTHER; note = bicyclic nucleic acid (BNA)
  modified_base 12: mod_base = OTHER; note = bicyclic nucleic acid (BNA)
  source 1..18: mol_type = other DNA
ctgtccaagcccggttga

SEQ ID NO: 14521 - DNA, 18 bp, synthetic construct
  misc_feature 1..18: note = Description of Artificial Sequence: Synthetic Antisense oligonucleotide
  modified_base 1: mod_base = OTHER; note = 5-methyl
  modified_base 5..6: mod_base = OTHER; note = 5-methyl
  modified_base 10..12: mod_base = OTHER; note = 5-methyl
  modified_base 1..2: mod_base = OTHER; note = bicyclic nucleic acid (BNA)
  modified_base 5: mod_base = OTHER; note = bicyclic nucleic acid (BNA)
  modified_base 17: mod_base = OTHER; note = bicyclic nucleic acid (BNA)
  source 1..18: mol_type = other DNA
ctgtccaagcccggttga

SEQ ID NO: 14522 - DNA, 18 bp, synthetic construct
  misc_feature 1..18: note = Description of Artificial Sequence: Synthetic Antisense oligonucleotide
  modified_base 1: mod_base = OTHER; note = 5-methyl
  modified_base 5..6: mod_base = OTHER; note = 5-methyl
  modified_base 10..12: mod_base = OTHER; note = 5-methyl
  modified_base 1..3: mod_base = OTHER; note = bicyclic nucleic acid (BNA)
  modified_base 11: mod_base = OTHER; note = bicyclic nucleic acid (BNA)
  source 1..18: mol_type = other DNA
ctgtccaagcccggttga

SEQ ID NO: 14523 - DNA, 18 bp, synthetic construct
  misc_feature 1..18: note = Description of Artificial Sequence: Synthetic Antisense oligonucleotide
  modified_base 1: mod_base = OTHER; note = 5-methyl
  modified_base 5..6: mod_base = OTHER; note = 5-methyl
  modified_base 10..12: mod_base = OTHER; note = 5-methyl
  modified_base 1..2: mod_base = OTHER; note = bicyclic nucleic acid (BNA)
  modified_base 10..11: mod_base = OTHER; note = bicyclic nucleic acid (BNA)
  source 1..18: mol_type = other DNA
ctgtccaagcccggttga

SEQ ID NO: 14524 - DNA, 18 bp, synthetic construct
  misc_feature 1..18: note = Description of Artificial Sequence: Synthetic Antisense oligonucleotide
  modified_base 1: mod_base = OTHER; note = 5-methyl
  modified_base 5..6: mod_base = OTHER; note = 5-methyl
  modified_base 10..12: mod_base = OTHER; note = 5-methyl
  modified_base 1..2: mod_base = OTHER; note = bicyclic nucleic acid (BNA)
  modified_base 10: mod_base = OTHER; note = bicyclic nucleic acid (BNA)
  modified_base 17: mod_base = OTHER; note = bicyclic nucleic acid (BNA)
  source 1..18: mol_type = other DNA
ctgtccaagcccggttga

SEQ ID NO: 14525 - DNA, 18 bp, synthetic construct
  misc_feature 1..18: note = Description of Artificial Sequence: Synthetic Antisense oligonucleotide
  modified_base 1: mod_base = OTHER; note = 5-methyl
  modified_base 5..6: mod_base = OTHER; note = 5-methyl
  modified_base 10..12: mod_base = OTHER; note = 5-methyl
  modified_base 1..2: mod_base = OTHER; note = bicyclic nucleic acid (BNA)
  modified_base 12..13: mod_base = OTHER; note = bicyclic nucleic acid (BNA)
  source 1..18: mol_type = other DNA
ctgtccaagcccggttga

SEQ ID NO: 14526 - DNA, 18 bp, synthetic construct
  misc_feature 1..18: note = Description of Artificial Sequence: Synthetic Antisense oligonucleotide
  modified_base 1: mod_base = OTHER; note = 5-methyl
  modified_base 5..6: mod_base = OTHER; note = 5-methyl
  modified_base 10..12: mod_base = OTHER; note = 5-methyl
  modified_base 1..2: mod_base = OTHER; note = bicyclic nucleic acid (BNA)
  modified_base 5: mod_base = OTHER; note = bicyclic nucleic acid (BNA)
  modified_base 12: mod_base = OTHER; note = bicyclic nucleic acid (BNA)
  source 1..18: mol_type = other DNA
ctgtccaagcccggttga

SEQ ID NO: 14527 - DNA, 18 bp, synthetic construct
  misc_feature 1..18: note = Description of Artificial Sequence: Synthetic Antisense oligonucleotide
  modified_base 1: mod_base = OTHER; note = 5-methyl
  modified_base 5..6: mod_base = OTHER; note = 5-methyl
  modified_base 10..12: mod_base = OTHER; note = 5-methyl
  modified_base 1..2: mod_base = OTHER; note = bicyclic nucleic acid (BNA)
  modified_base 10: mod_base = OTHER; note = bicyclic nucleic acid (BNA)
  modified_base 14: mod_base = OTHER; note = bicyclic nucleic acid (BNA)
  source 1..18: mol_type = other DNA
ctgtccaagcccggttga

SEQ ID NO: 14528 - DNA, 18 bp, synthetic construct
  misc_feature 1..18: note = Description of Artificial Sequence: Synthetic Antisense oligonucleotide
  modified_base 1: mod_base = OTHER; note = 5-methyl
  modified_base 5..6: mod_base = OTHER; note = 5-methyl
  modified_base 10..12: mod_base = OTHER; note = 5-methyl
  modified_base 1..2: mod_base = OTHER; note = bicyclic nucleic acid (BNA)
  modified_base 6: mod_base = OTHER; note = bicyclic nucleic acid (BNA)
  modified_base 11: mod_base = OTHER; note = bicyclic nucleic acid (BNA)
  source 1..18: mol_type = other DNA
ctgtccaagcccggttga

SEQ ID NO: 14529 - DNA, 18 bp, synthetic construct
  misc_feature 1..18: note = Description of Artificial Sequence: Synthetic Antisense oligonucleotide
  modified_base 1: mod_base = OTHER; note = 5-methyl
  modified_base 5..6: mod_base = OTHER; note = 5-methyl
  modified_base 10..12: mod_base = OTHER; note = 5-methyl
  modified_base 1..2: mod_base = OTHER; note = bicyclic nucleic acid (BNA)
  modified_base 6: mod_base = OTHER; note = bicyclic nucleic acid (BNA)
  modified_base 17: mod_base = OTHER; note = bicyclic nucleic acid (BNA)
  source 1..18: mol_type = other DNA
ctgtccaagcccggttga

SEQ ID NO: 14530 - DNA, 18 bp, synthetic construct
  misc_feature 1..18: note = Description of Artificial Sequence: Synthetic Antisense oligonucleotide
  modified_base 1: mod_base = OTHER; note = 5-methyl
  modified_base 5..6: mod_base = OTHER; note = 5-methyl
  modified_base 10..12: mod_base = OTHER; note = 5-methyl
  modified_base 1..2: mod_base = OTHER; note = bicyclic nucleic acid (BNA)
  modified_base 9: mod_base = OTHER; note = bicyclic nucleic acid (BNA)
  modified_base 13: mod_base = OTHER; note = bicyclic nucleic acid (BNA)
  source 1..18: mol_type = other DNA
ctgtccaagcccggttga

SEQ ID NO: 14531 - DNA, 18 bp, synthetic construct
  misc_feature 1..18: note = Description of Artificial Sequence: Synthetic Antisense oligonucleotide
  modified_base 1: mod_base = OTHER; note = 5-methyl
  modified_base 5..6: mod_base = OTHER; note = 5-methyl
  modified_base 10..12: mod_base = OTHER; note = 5-methyl
  modified_base 1..2: mod_base = OTHER; note = bicyclic nucleic acid (BNA)
  modified_base 11: mod_base = OTHER; note = bicyclic nucleic acid (BNA)
  modified_base 17: mod_base = OTHER; note = bicyclic nucleic acid (BNA)
  source 1..18: mol_type = other DNA
ctgtccaagcccggttga

SEQ ID NO: 14532 - DNA, 18 bp, synthetic construct
  misc_feature 1..18: note = Description of Artificial Sequence: Synthetic Antisense oligonucleotide
  modified_base 1: mod_base = OTHER; note = 5-methyl
  modified_base 5..6: mod_base = OTHER; note = 5-methyl
  modified_base 10..12: mod_base = OTHER; note = 5-methyl
  modified_base 1..3: mod_base = OTHER; note = bicyclic nucleic acid (BNA)
  modified_base 12: mod_base = OTHER; note = bicyclic nucleic acid (BNA)
  source 1..18: mol_type = other DNA
ctgtccaagcccggttga

SEQ ID NO: 14533 - DNA, 18 bp, synthetic construct
  misc_feature 1..18: note = Description of Artificial Sequence: Synthetic Antisense oligonucleotide
  modified_base 1: mod_base = OTHER; note = 5-methyl
  modified_base 5..6: mod_base = OTHER; note = 5-methyl
  modified_base 10..12: mod_base = OTHER; note = 5-methyl
  modified_base 1..3: mod_base = OTHER; note = bicyclic nucleic acid (BNA)
  modified_base 5: mod_base = OTHER; note = bicyclic nucleic acid (BNA)
  source 1..18: mol_type = other DNA
ctgtccaagcccggttga

SEQ ID NO: 14534 - DNA, 18 bp, synthetic construct
  misc_feature 1..18: note = Description of Artificial Sequence: Synthetic Antisense oligonucleotide
  modified_base 1: mod_base = OTHER; note = 5-methyl
  modified_base 5..6: mod_base = OTHER; note = 5-methyl
  modified_base 10..12: mod_base = OTHER; note = 5-methyl
  modified_base 1..2: mod_base = OTHER; note = bicyclic nucleic acid (BNA)
  modified_base 10: mod_base = OTHER; note = bicyclic nucleic acid (BNA)
  modified_base 13: mod_base = OTHER; note = bicyclic nucleic acid (BNA)
  source 1..18: mol_type = other DNA
ctgtccaagcccggttga

SEQ ID NO: 14535 - DNA, 20 bp, synthetic construct
  misc_feature 1..20: note = Description of Artificial Sequence: Synthetic Antisense oligonucleotide
  modified_base 1..2: mod_base = OTHER; note = bicyclic nucleic acid (BNA)
  modified_base 9: mod_base = OTHER; note = bicyclic nucleic acid (BNA)
  modified_base 2: mod_base = OTHER; note = 5-methyl
  modified_base 14: mod_base = OTHER; note = 5-methyl
  modified_base 19: mod_base = OTHER; note = 5-methyl
  source 1..20: mol_type = other DNA
tcaaggaagatggcatttct

SEQ ID NO: 14536 - DNA, 20 bp, synthetic construct
  misc_feature 1..20: note = Description of Artificial Sequence: Synthetic Antisense oligonucleotide
  modified_base 1..2: mod_base = OTHER; note = bicyclic nucleic acid (BNA)
  modified_base 5: mod_base = OTHER; note = bicyclic nucleic acid (BNA)
  modified_base 2: mod_base = OTHER; note = 5-methyl
  modified_base 14: mod_base = OTHER; note = 5-methyl
  modified_base 19: mod_base = OTHER; note = 5-methyl
  source 1..20: mol_type = other DNA
tcaaggaagatggcatttct

SEQ ID NO: 14537 - DNA, 20 bp, synthetic construct
  misc_feature 1..20: note = Description of Artificial Sequence: Synthetic Antisense oligonucleotide
  modified_base 1..2: mod_base = OTHER; note = bicyclic nucleic acid (BNA)
  modified_base 6: mod_base = OTHER; note = bicyclic nucleic acid (BNA)
  modified_base 2: mod_base = OTHER; note = 5-methyl
  modified_base 14: mod_base = OTHER; note = 5-methyl
  modified_base 19: mod_base = OTHER; note = 5-methyl
  source 1..20: mol_type = other DNA
tcaaggaagatggcatttct

SEQ ID NO: 14538 - DNA, 20 bp, synthetic construct
  misc_feature 1..20: note = Description of Artificial Sequence: Synthetic Antisense oligonucleotide
  modified_base 1..2: mod_base = OTHER; note = bicyclic nucleic acid (BNA)
  modified_base 12: mod_base = OTHER; note = bicyclic nucleic acid (BNA)
  modified_base 2: mod_base = OTHER; note = 5-methyl
  modified_base 14: mod_base = OTHER; note = 5-methyl
  modified_base 19: mod_base = OTHER; note = 5-methyl
  source 1..20: mol_type = other DNA
tcaaggaagatggcatttct

SEQ ID NO: 14539 - DNA, 20 bp, synthetic construct
  misc_feature 1..20: note = Description of Artificial Sequence: Synthetic Antisense oligonucleotide
  modified_base 1..2: mod_base = OTHER; note = bicyclic nucleic acid (BNA)
  modified_base 13: mod_base = OTHER; note = bicyclic nucleic acid (BNA)
  modified_base 2: mod_base = OTHER; note = 5-methyl
  modified_base 14: mod_base = OTHER; note = 5-methyl
  modified_base 19: mod_base = OTHER; note = 5-methyl
  source 1..20: mol_type = other DNA
tcaaggaagatggcatttct

SEQ ID NO: 14540 - DNA, 20 bp, synthetic construct
  misc_feature 1..20: note = Description of Artificial Sequence: Synthetic Antisense oligonucleotide
  modified_base 1..2: mod_base = OTHER; note = bicyclic nucleic acid (BNA)
  modified_base 19: mod_base = OTHER; note = bicyclic nucleic acid (BNA)
  modified_base 2: mod_base = OTHER; note = 5-methyl
  modified_base 14: mod_base = OTHER; note = 5-methyl
  modified_base 19: mod_base = OTHER; note = 5-methyl
  source 1..20: mol_type = other DNA
tcaaggaagatggcatttct

SEQ ID NO: 14541 - DNA, 20 bp, synthetic construct
  misc_feature 1..20: note = Description of Artificial Sequence: Synthetic Antisense oligonucleotide
  modified_base 1..2: mod_base = OTHER; note = bicyclic nucleic acid (BNA)
  modified_base 14: mod_base = OTHER; note = bicyclic nucleic acid (BNA)
  modified_base 2: mod_base = OTHER; note = 5-methyl
  modified_base 14: mod_base = OTHER; note = 5-methyl
  modified_base 19: mod_base = OTHER; note = 5-methyl
  source 1..20: mol_type = other DNA
tcaaggaagatggcatttct

SEQ ID NO: 14542 - DNA, 22 bp, synthetic construct
  misc_feature 1..22: note = Description of Artificial Sequence: Synthetic Antisense oligonucleotide
  modified_base 1..2: mod_base = OTHER; note = bicyclic nucleic acid (BNA)
  modified_base 9: mod_base = OTHER; note = bicyclic nucleic acid (BNA)
  modified_base 2: mod_base = OTHER; note = 5-methyl
  modified_base 14: mod_base = OTHER; note = 5-methyl
  modified_base 19: mod_base = OTHER; note = 5-methyl
  source 1..22: mol_type = other DNA
tcaaggaagatggcatttctag

SEQ ID NO: 14543 - DNA, 22 bp, synthetic construct
  misc_feature 1..22: note = Description of Artificial Sequence: Synthetic Antisense oligonucleotide
  modified_base 1..2: mod_base = OTHER; note = bicyclic nucleic acid (BNA)
  modified_base 5: mod_base = OTHER; note = bicyclic nucleic acid (BNA)
  modified_base 2: mod_base = OTHER; note = 5-methyl
  modified_base 14: mod_base = OTHER; note = 5-methyl
  modified_base 19: mod_base = OTHER; note = 5-methyl
  source 1..22: mol_type = other DNA
tcaaggaagatggcatttctag

SEQ ID NO: 14544 - DNA, 22 bp, synthetic construct
  misc_feature 1..22: note = Description of Artificial Sequence: Synthetic Antisense oligonucleotide
  modified_base 1..2: mod_base = OTHER; note = bicyclic nucleic acid (BNA)
  modified_base 6: mod_base = OTHER; note = bicyclic nucleic acid (BNA)
  modified_base 2: mod_base = OTHER; note = 5-methyl
  modified_base 14: mod_base = OTHER; note = 5-methyl
  modified_base 19: mod_base = OTHER; note = 5-methyl
  source 1..22: mol_type = other DNA
tcaaggaagatggcatttctag

SEQ ID NO: 14545 - DNA, 22 bp, synthetic construct
  misc_feature 1..22: note = Description of Artificial Sequence: Synthetic Antisense oligonucleotide
  modified_base 1..2: mod_base = OTHER; note = bicyclic nucleic acid (BNA)
  modified_base 12: mod_base = OTHER; note = bicyclic nucleic acid (BNA)
  modified_base 2: mod_base = OTHER; note = 5-methyl
  modified_base 14: mod_base = OTHER; note = 5-methyl
  modified_base 19: mod_base = OTHER; note = 5-methyl
  source 1..22: mol_type = other DNA
tcaaggaagatggcatttctag

SEQ ID NO: 14546 - DNA, 22 bp, synthetic construct
  misc_feature 1..22: note = Description of Artificial Sequence: Synthetic Antisense oligonucleotide
  modified_base 1..2: mod_base = OTHER; note = bicyclic nucleic acid (BNA)
  modified_base 13: mod_base = OTHER; note = bicyclic nucleic acid (BNA)
  modified_base 2: mod_base = OTHER; note = 5-methyl
  modified_base 14: mod_base = OTHER; note = 5-methyl
  modified_base 19: mod_base = OTHER; note = 5-methyl
  source 1..22: mol_type = other DNA
tcaaggaagatggcatttctag

SEQ ID NO: 14547 - DNA, 22 bp, synthetic construct
  misc_feature 1..22: note = Description of Artificial Sequence: Synthetic Antisense oligonucleotide
  modified_base 1..2: mod_base = OTHER; note = bicyclic nucleic acid (BNA)
  modified_base 19: mod_base = OTHER; note = bicyclic nucleic acid (BNA)
  modified_base 2: mod_base = OTHER; note = 5-methyl
  modified_base 14: mod_base = OTHER; note = 5-methyl
  modified_base 19: mod_base = OTHER; note = 5-methyl
  source 1..22: mol_type = other DNA
tcaaggaagatggcatttctag

SEQ ID NO: 14548 - DNA, 22 bp, synthetic construct
  misc_feature 1..22: note = Description of Artificial Sequence: Synthetic Antisense oligonucleotide
  modified_base 1..2: mod_base = OTHER; note = bicyclic nucleic acid (BNA)
  modified_base 14: mod_base = OTHER; note = bicyclic nucleic acid (BNA)
  modified_base 2: mod_base = OTHER; note = 5-methyl
  modified_base 14: mod_base = OTHER; note = 5-methyl
  modified_base 19: mod_base = OTHER; note = 5-methyl
  source 1..22: mol_type = other DNA
tcaaggaagatggcatttctag

SEQ ID NO: 14549 - DNA, 20 bp, synthetic construct
  misc_feature 1..20: note = Description of Artificial Sequence: Synthetic Antisense oligonucleotide
  modified_base 1..2: mod_base = OTHER; note = bicyclic nucleic acid (BNA)
  modified_base 9: mod_base = OTHER; note = bicyclic nucleic acid (BNA)
  modified_base 14: mod_base = OTHER; note = bicyclic nucleic acid (BNA)
  modified_base 2: mod_base = OTHER; note = 5-methyl
  modified_base 14: mod_base = OTHER; note = 5-methyl
  modified_base 19: mod_base = OTHER; note = 5-methyl
  source 1..20: mol_type = other DNA
tcaaggaagatggcatttct

SEQ ID NO: 14550 - DNA, 20 bp, synthetic construct
  misc_feature 1..20: note = Description of Artificial Sequence: Synthetic Antisense oligonucleotide
  modified_base 1..2: mod_base = OTHER; note = bicyclic nucleic acid (BNA)
  modified_base 5: mod_base = OTHER; note = bicyclic nucleic acid (BNA)
  modified_base 9: mod_base = OTHER; note = bicyclic nucleic acid (BNA)
  modified_base 2: mod_base = OTHER; note = 5-methyl
  modified_base 14: mod_base = OTHER; note = 5-methyl
  modified_base 19: mod_base = OTHER; note = 5-methyl
  source 1..20: mol_type = other DNA
tcaaggaagatggcatttct

SEQ ID NO: 14551 - DNA, 20 bp, synthetic construct
  misc_feature 1..20: note = Description of Artificial Sequence: Synthetic Antisense oligonucleotide
  modified_base 1..2: mod_base = OTHER; note = bicyclic nucleic acid (BNA)
  modified_base 5: mod_base = OTHER; note = bicyclic nucleic acid (BNA)
  modified_base 19: mod_base = OTHER; note = bicyclic nucleic acid (BNA)
  modified_base 2: mod_base = OTHER; note = 5-methyl
  modified_base 14: mod_base = OTHER; note = 5-methyl
  modified_base 19: mod_base = OTHER; note = 5-methyl
  source 1..20: mol_type = other DNA
tcaaggaagatggcatttct

SEQ ID NO: 14552 - DNA, 20 bp, synthetic construct
  misc_feature 1..20: note = Description of Artificial Sequence: Synthetic Antisense oligonucleotide
  modified_base 1..2: mod_base = OTHER; note = bicyclic nucleic acid (BNA)
  modified_base 6: mod_base = OTHER; note = bicyclic nucleic acid (BNA)
  modified_base 14: mod_base = OTHER; note = bicyclic nucleic acid (BNA)
  modified_base 2: mod_base = OTHER; note = 5-methyl
  modified_base 14: mod_base = OTHER; note = 5-methyl
  modified_base 19: mod_base = OTHER; note = 5-methyl
  source 1..20: mol_type = other DNA
tcaaggaagatggcatttct

SEQ ID NO: 14553 - DNA, 20 bp, synthetic construct
  misc_feature 1..20: note = Description of Artificial Sequence: Synthetic Antisense oligonucleotide
  modified_base 1..2: mod_base = OTHER; note = bicyclic nucleic acid (BNA)
  modified_base 5: mod_base = OTHER; note = bicyclic nucleic acid (BNA)
  modified_base 13: mod_base = OTHER; note = bicyclic nucleic acid (BNA)
  modified_base 2: mod_base = OTHER; note = 5-methyl
  modified_base 14: mod_base = OTHER; note = 5-methyl
  modified_base 19: mod_base = OTHER; note = 5-methyl
  source 1..20: mol_type = other DNA
tcaaggaagatggcatttct

SEQ ID NO: 14554 - DNA, 20 bp, synthetic construct
  misc_feature 1..20: note = Description of Artificial Sequence: Synthetic Antisense oligonucleotide
  modified_base 1..2: mod_base = OTHER; note = bicyclic nucleic acid (BNA)
  modified_base 6: mod_base = OTHER; note = bicyclic nucleic acid (BNA)
  modified_base 9: mod_base = OTHER; note = bicyclic nucleic acid (BNA)
  modified_base 2: mod_base = OTHER; note = 5-methyl
  modified_base 14: mod_base = OTHER; note = 5-methyl
  modified_base 19: mod_base = OTHER; note = 5-methyl
  source 1..20: mol_type = other DNA
tcaaggaagatggcatttct

SEQ ID NO: 14555 - DNA, 20 bp, synthetic construct
  misc_feature 1..20: note = Description of Artificial Sequence: Synthetic Antisense oligonucleotide
  modified_base 1..2: mod_base = OTHER; note = bicyclic nucleic acid (BNA)
  modified_base 13..14: mod_base = OTHER; note = bicyclic nucleic acid (BNA)
  modified_base 2: mod_base = OTHER; note = 5-methyl
  modified_base 14: mod_base = OTHER; note = 5-methyl
  modified_base 19: mod_base = OTHER; note = 5-methyl
  source 1..20: mol_type = other DNA
tcaaggaagatggcatttct

SEQ ID NO: 14556 - DNA, 20 bp, synthetic construct
  misc_feature 1..20: note = Description of Artificial Sequence: Synthetic Antisense oligonucleotide
  modified_base 1..2: mod_base = OTHER; note = bicyclic nucleic acid (BNA)
  modified_base 6: mod_base = OTHER; note = bicyclic nucleic acid (BNA)
  modified_base 13: mod_base = OTHER; note = bicyclic nucleic acid (BNA)
  modified_base 2: mod_base = OTHER; note = 5-methyl
  modified_base 14: mod_base = OTHER; note = 5-methyl
  modified_base 19: mod_base = OTHER; note = 5-methyl
  source 1..20: mol_type = other DNA
tcaaggaagatggcatttct

SEQ ID NO: 14557 - DNA, 20 bp, synthetic construct
  misc_feature 1..20: note = Description of Artificial Sequence: Synthetic Antisense oligonucleotide
  modified_base 1..2: mod_base = OTHER; note = bicyclic nucleic acid (BNA)
  modified_base 6: mod_base = OTHER; note = bicyclic nucleic acid (BNA)
  modified_base 19: mod_base = OTHER; note = bicyclic nucleic acid (BNA)
  modified_base 2: mod_base = OTHER; note = 5-methyl
  modified_base 14: mod_base = OTHER; note = 5-methyl
  modified_base 19: mod_base = OTHER; note = 5-methyl
  source 1..20: mol_type = other DNA
tcaaggaagatggcatttct

SEQ ID NO: 14558 - DNA, 20 bp, synthetic construct
  misc_feature 1..20: note = Description of Artificial Sequence: Synthetic Antisense oligonucleotide
  modified_base 1..2: mod_base = OTHER; note = bicyclic nucleic acid (BNA)
  modified_base 5: mod_base = OTHER; note = bicyclic nucleic acid (BNA)
  modified_base 14: mod_base = OTHER; note = bicyclic nucleic acid (BNA)
  modified_base 2: mod_base = OTHER; note = 5-methyl
  modified_base 14: mod_base = OTHER; note = 5-methyl
  modified_base 19: mod_base = OTHER; note = 5-methyl
  source 1..20: mol_type = other DNA
tcaaggaagatggcatttct

SEQ ID NO: 14559 - DNA, 20 bp, synthetic construct
  misc_feature 1..20: note = Description of Artificial Sequence: Synthetic Antisense oligonucleotide
  modified_base 1..2: mod_base = OTHER; note = bicyclic nucleic acid (BNA)
  modified_base 12: mod_base = OTHER; note = bicyclic nucleic acid (BNA)
  modified_base 19: mod_base = OTHER; note = bicyclic nucleic acid (BNA)
  modified_base 2: mod_base = OTHER; note = 5-methyl
  modified_base 14: mod_base = OTHER; note = 5-methyl
  modified_base 19: mod_base = OTHER; note = 5-methyl
  source 1..20: mol_type = other DNA
tcaaggaagatggcatttct

SEQ ID NO: 14560 - DNA, 20 bp, synthetic construct
  misc_feature 1..20: note = Description of Artificial Sequence: Synthetic Antisense oligonucleotide
  modified_base 1..2: mod_base = OTHER; note = bicyclic nucleic acid (BNA)
  modified_base 12: mod_base = OTHER; note = bicyclic nucleic acid (BNA)
  modified_base 14: mod_base = OTHER; note = bicyclic nucleic acid (BNA)
  modified_base 2: mod_base = OTHER; note = 5-methyl
  modified_base 14: mod_base = OTHER; note = 5-methyl
  modified_base 19: mod_base = OTHER; note = 5-methyl
  source 1..20: mol_type = other DNA
tcaaggaagatggcatttct

SEQ ID NO: 14561 - DNA, 20 bp, synthetic construct
  misc_feature 1..20: note = Description of Artificial Sequence: Synthetic Antisense oligonucleotide
  modified_base 1..2: mod_base = OTHER; note = bicyclic nucleic acid (BNA)
  modified_base 6: mod_base = OTHER; note = bicyclic nucleic acid (BNA)
  modified_base 12: mod_base = OTHER; note = bicyclic nucleic acid (BNA)
  modified_base 2: mod_base = OTHER; note = 5-methyl
  modified_base 14: mod_base = OTHER; note = 5-methyl
  modified_base 19: mod_base = OTHER; note = 5-methyl
  source 1..20: mol_type = other DNA
tcaaggaagatggcatttct

SEQ ID NO: 14562 - DNA, 20 bp, synthetic construct
  misc_feature 1..20: note = Description of Artificial Sequence: Synthetic Antisense oligonucleotide
  modified_base 1..2: mod_base = OTHER; note = bicyclic nucleic acid (BNA)
  modified_base 5..6: mod_base = OTHER; note = bicyclic nucleic acid (BNA)
  modified_base 2: mod_base = OTHER; note = 5-methyl
  modified_base 14: mod_base = OTHER; note = 5-methyl
  modified_base 19: mod_base = OTHER; note = 5-methyl
  source 1..20: mol_type = other DNA
tcaaggaagatggcatttct

SEQ ID NO: 14563 - DNA, 20 bp, synthetic construct
  misc_feature 1..20: note = Description of Artificial Sequence: Synthetic Antisense oligonucleotide
  modified_base 1..2: mod_base = OTHER; note = bicyclic nucleic acid (BNA)
  modified_base 9: mod_base = OTHER; note = bicyclic nucleic acid (BNA)
  modified_base 12: mod_base = OTHER; note = bicyclic nucleic acid (BNA)
  modified_base 2: mod_base = OTHER; note = 5-methyl
  modified_base 14: mod_base = OTHER; note = 5-methyl
  modified_base 19: mod_base = OTHER; note = 5-methyl
  source 1..20: mol_type = other DNA
tcaaggaagatggcatttct

SEQ ID NO: 14564 - DNA, 20 bp, synthetic construct
  misc_feature 1..20: note = Description of Artificial Sequence: Synthetic Antisense oligonucleotide
  modified_base 1..2: mod_base = OTHER; note = bicyclic nucleic acid (BNA)
  modified_base 13: mod_base = OTHER; note = bicyclic nucleic acid (BNA)
  modified_base 19: mod_base = OTHER; note = bicyclic nucleic acid (BNA)
  modified_base 2: mod_base = OTHER; note = 5-methyl
  modified_base 14: mod_base = OTHER; note = 5-methyl
  modified_base 19: mod_base = OTHER; note = 5-methyl
  source 1..20: mol_type = other DNA
tcaaggaagatggcatttct

SEQ ID NO: 14565 - DNA, 20 bp, synthetic construct
  misc_feature 1..20: note = Description of Artificial Sequence: Synthetic Antisense oligonucleotide
  modified_base 1..2: mod_base = OTHER; note = bicyclic nucleic acid (BNA)
  modified_base 12..13: mod_base = OTHER; note = bicyclic nucleic acid (BNA)
  modified_base 2: mod_base = OTHER; note = 5-methyl
  modified_base 14: mod_base = OTHER; note = 5-methyl
  modified_base 19: mod_base = OTHER; note = 5-methyl
  source 1..20: mol_type = other DNA
tcaaggaagatggcatttct

SEQ ID NO: 14566 - DNA, 20 bp, synthetic construct
  misc_feature 1..20: note = Description of Artificial Sequence: Synthetic Antisense oligonucleotide
  modified_base 1..2: mod_base = OTHER; note = bicyclic nucleic acid (BNA)
  modified_base 5: mod_base = OTHER; note = bicyclic nucleic acid (BNA)
  modified_base 12: mod_base = OTHER; note = bicyclic nucleic acid (BNA)
  modified_base 2: mod_base = OTHER; note = 5-methyl
  modified_base 14: mod_base = OTHER; note = 5-methyl
  modified_base 19: mod_base = OTHER; note = 5-methyl
  source 1..20: mol_type = other DNA
tcaaggaagatggcatttct

SEQ ID NO: 14567 - DNA, 20 bp, synthetic construct
  misc_feature 1..20: note = Description of Artificial Sequence: Synthetic Antisense oligonucleotide
  modified_base 1..2: mod_base = OTHER; note = bicyclic nucleic acid (BNA)
  modified_base 9: mod_base = OTHER; note = bicyclic nucleic acid (BNA)
  modified_base 13: mod_base = OTHER; note = bicyclic nucleic acid (BNA)
  modified_base 2: mod_base = OTHER; note = 5-methyl
  modified_base 14: mod_base = OTHER; note = 5-methyl
  modified_base 19: mod_base = OTHER; note = 5-methyl
  source 1..20: mol_type = other DNA
tcaaggaagatggcatttct

SEQ ID NO: 14568 - DNA, 20 bp, synthetic construct
  misc_feature 1..20: note = Description of Artificial Sequence: Synthetic Antisense oligonucleotide
  modified_base 1..2: mod_base = OTHER; note = bicyclic nucleic acid (BNA)
  modified_base 14: mod_base = OTHER; note = bicyclic nucleic acid (BNA)
  modified_base 19: mod_base = OTHER; note = bicyclic nucleic acid (BNA)
  modified_base 2: mod_base = OTHER; note = 5-methyl
  modified_base 14: mod_base = OTHER; note = 5-methyl
  modified_base 19: mod_base = OTHER; note = 5-methyl
  source 1..20: mol_type = other DNA
tcaaggaagatggcatttct

SEQ ID NO: 14569 - DNA, 20 bp, synthetic construct
  misc_feature 1..20: note = Description of Artificial Sequence: Synthetic Antisense oligonucleotide
  modified_base 1..2: mod_base = OTHER; note = bicyclic nucleic acid (BNA)
  modified_base 9: mod_base = OTHER; note = bicyclic nucleic acid (BNA)
  modified_base 19: mod_base = OTHER; note = bicyclic nucleic acid (BNA)
  modified_base 2: mod_base = OTHER; note = 5-methyl
  modified_base 14: mod_base = OTHER; note = 5-methyl
  modified_base 19: mod_base = OTHER; note = 5-methyl
  source 1..20: mol_type = other DNA
tcaaggaagatggcatttct

SEQ ID NO: 14570 - DNA, 22 bp, synthetic construct
  misc_feature 1..22: note = Description of Artificial Sequence: Synthetic Antisense oligonucleotide
  modified_base 1..2: mod_base = OTHER; note = bicyclic nucleic acid (BNA)
  modified_base 9: mod_base = OTHER; note = bicyclic nucleic acid (BNA)
  modified_base 14: mod_base = OTHER; note = bicyclic nucleic acid (BNA)
  modified_base 2: mod_base = OTHER; note = 5-methyl
  modified_base 14: mod_base = OTHER; note = 5-methyl
  modified_base 19: mod_base = OTHER; note = 5-methyl
  source 1..22: mol_type = other DNA
tcaaggaagatggcatttctag

SEQ ID NO: 14571 - DNA, 22 bp, synthetic construct
  misc_feature 1..22: note = Description of Artificial Sequence: Synthetic Antisense oligonucleotide
  modified_base 1..2: mod_base = OTHER; note = bicyclic nucleic acid (BNA)
  modified_base 5: mod_base = OTHER; note = bicyclic nucleic acid (BNA)
  modified_base 9: mod_base = OTHER; note = bicyclic nucleic acid (BNA)
  modified_base 2: mod_base = OTHER; note = 5-methyl
  modified_base 14: mod_base = OTHER; note = 5-methyl
  modified_base 19: mod_base = OTHER; note = 5-methyl
  source 1..22: mol_type = other DNA
tcaaggaagatggcatttctag

SEQ ID NO: 14572 - DNA, 22 bp, synthetic construct
  misc_feature 1..22: note = Description of Artificial Sequence: Synthetic Antisense oligonucleotide
  modified_base 1..2: mod_base = OTHER; note = bicyclic nucleic acid (BNA)
  modified_base 5: mod_base = OTHER; note = bicyclic nucleic acid (BNA)
  modified_base 19: mod_base = OTHER; note = bicyclic nucleic acid (BNA)
  modified_base 2: mod_base = OTHER; note = 5-methyl
  modified_base 14: mod_base = OTHER; note = 5-methyl
  modified_base 19: mod_base = OTHER; note = 5-methyl
  source 1..22: mol_type = other DNA
tcaaggaagatggcatttctag

SEQ ID NO: 14573 - DNA, 22 bp, synthetic construct
  misc_feature 1..22: note = Description of Artificial Sequence: Synthetic Antisense oligonucleotide
  modified_base 1..2: mod_base = OTHER; note = bicyclic nucleic acid (BNA)
  modified_base 6: mod_base = OTHER; note = bicyclic nucleic acid (BNA)
  modified_base 14: mod_base = OTHER; note = bicyclic nucleic acid (BNA)
  modified_base 2: mod_base = OTHER; note = 5-methyl
  modified_base 14: mod_base = OTHER; note = 5-methyl
  modified_base 19: mod_base = OTHER; note = 5-methyl
  source 1..22: mol_type = other DNA
tcaaggaagatggcatttctag

SEQ ID NO: 14574 - DNA, 22 bp, synthetic construct
  misc_feature 1..22: note = Description of Artificial Sequence: Synthetic Antisense oligonucleotide
  modified_base 1..2: mod_base = OTHER; note = bicyclic nucleic acid (BNA)
  modified_base 5: mod_base = OTHER; note = bicyclic nucleic acid (BNA)
  modified_base 13: mod_base = OTHER; note = bicyclic nucleic acid (BNA)
  modified_base 2: mod_base = OTHER; note = 5-methyl
  modified_base 14: mod_base = OTHER; note = 5-methyl
  modified_base 19: mod_base = OTHER; note = 5-methyl
  source 1..22: mol_type = other DNA
tcaaggaagatggcatttctag

SEQ ID NO: 14575 - DNA, 22 bp, synthetic construct
  misc_feature 1..22: note = Description of Artificial Sequence: Synthetic Antisense oligonucleotide
  modified_base 1..2: mod_base = OTHER; note = bicyclic nucleic acid (BNA)
  modified_base 6: mod_base = OTHER; note = bicyclic nucleic acid (BNA)
  modified_base 9: mod_base = OTHER; note = bicyclic nucleic acid (BNA)
  modified_base 2: mod_base = OTHER; note = 5-methyl
  modified_base 14: mod_base = OTHER; note = 5-methyl
  modified_base 19: mod_base = OTHER; note = 5-methyl
  source 1..22: mol_type = other DNA
tcaaggaagatggcatttctag

SEQ ID NO: 14576 - DNA, 22 bp, synthetic construct
  misc_feature 1..22: note = Description of Artificial Sequence: Synthetic Antisense oligonucleotide
  modified_base 1..2: mod_base = OTHER; note = bicyclic nucleic acid (BNA)
  modified_base 13..14: mod_base = OTHER; note = bicyclic nucleic acid (BNA)
  modified_base 2: mod_base = OTHER; note = 5-methyl
  modified_base 14: mod_base = OTHER; note = 5-methyl
  modified_base 19: mod_base = OTHER; note = 5-methyl
  source 1..22: mol_type = other DNA
tcaaggaagatggcatttctag

SEQ ID NO: 14577 - DNA, 22 bp, synthetic construct
  misc_feature 1..22: note = Description of Artificial Sequence: Synthetic Antisense oligonucleotide
  modified_base 1..2: mod_base = OTHER; note = bicyclic nucleic acid (BNA)
  modified_base 6: mod_base = OTHER; note = bicyclic nucleic acid (BNA)
  modified_base 13: mod_base = OTHER; note = bicyclic nucleic acid (BNA)
  modified_base 2: mod_base = OTHER; note = 5-methyl
  modified_base 14: mod_base = OTHER; note = 5-methyl
  modified_base 19: mod_base = OTHER; note = 5-methyl
  source 1..22: mol_type = other DNA
tcaaggaagatggcatttctag

SEQ ID NO: 14578 - DNA, 22 bp, synthetic construct
  misc_feature 1..22: note = Description of Artificial Sequence: Synthetic Antisense oligonucleotide
  modified_base 1..2: mod_base = OTHER; note = bicyclic nucleic acid (BNA)
  modified_base 6: mod_base = OTHER; note = bicyclic nucleic acid (BNA)
  modified_base 19: mod_base = OTHER; note = bicyclic nucleic acid (BNA)
  modified_base 2: mod_base = OTHER; note = 5-methyl
  modified_base 14: mod_base = OTHER; note = 5-methyl
  modified_base 19: mod_base = OTHER; note = 5-methyl
  source 1..22: mol_type = other DNA
tcaaggaagatggcatttctag

SEQ ID NO: 14579 - DNA, 22 bp, synthetic construct
  misc_feature 1..22: note = Description of Artificial Sequence: Synthetic Antisense oligonucleotide
  modified_base 1..2: mod_base = OTHER; note = bicyclic nucleic acid (BNA)
  modified_base 5: mod_base = OTHER; note = bicyclic nucleic acid (BNA)
  modified_base 14: mod_base = OTHER; note = bicyclic nucleic acid (BNA)
  modified_base 2: mod_base = OTHER; note = 5-methyl
  modified_base 14: mod_base = OTHER; note = 5-methyl
  modified_base 19: mod_base = OTHER; note = 5-methyl
  source 1..22: mol_type = other DNA
tcaaggaagatggcatttctag

SEQ ID NO: 14580 - DNA, 22 bp, synthetic construct
  misc_feature 1..22: note = Description of Artificial Sequence: Synthetic Antisense oligonucleotide
  modified_base 1..2: mod_base = OTHER; note = bicyclic nucleic acid (BNA)
  modified_base 12: mod_base = OTHER; note = bicyclic nucleic acid (BNA)
  modified_base 19: mod_base = OTHER; note = bicyclic nucleic acid (BNA)
  modified_base 2: mod_base = OTHER; note = 5-methyl
  modified_base 14: mod_base = OTHER; note = 5-methyl
  modified_base 19: mod_base = OTHER; note = 5-methyl
  source 1..22: mol_type = other DNA
tcaaggaagatggcatttctag

SEQ ID NO: 14581 - DNA, 22 bp, synthetic construct
  misc_feature 1..22: note = Description of Artificial Sequence: Synthetic Antisense oligonucleotide
  modified_base 1..2: mod_base = OTHER; note = bicyclic nucleic acid (BNA)
  modified_base 12: mod_base = OTHER; note = bicyclic nucleic acid (BNA)
  modified_base 14: mod_base = OTHER; note = bicyclic nucleic acid (BNA)
  modified_base 2: mod_base = OTHER; note = 5-methyl
  modified_base 14: mod_base = OTHER; note = 5-methyl
  modified_base 19: mod_base = OTHER; note = 5-methyl
  source 1..22: mol_type = other DNA
tcaaggaagatggcatttctag

SEQ ID NO: 14582 - DNA, 22 bp, synthetic construct
  misc_feature 1..22: note = Description of Artificial Sequence: Synthetic Antisense oligonucleotide
  modified_base 1..2: mod_base = OTHER; note = bicyclic nucleic acid (BNA)
  modified_base 6: mod_base = OTHER; note = bicyclic nucleic acid (BNA)
  modified_base 12: mod_base = OTHER; note = bicyclic nucleic acid (BNA)
  modified_base 2: mod_base = OTHER; note = 5-methyl
  modified_base 14: mod_base = OTHER; note = 5-methyl
  modified_base 19: mod_base = OTHER; note = 5-methyl
  source 1..22: mol_type = other DNA
tcaaggaagatggcatttctag

SEQ ID NO: 14583 - DNA, 22 bp, synthetic construct
  misc_feature 1..22: note = Description of Artificial Sequence: Synthetic Antisense oligonucleotide
  modified_base 1..2: mod_base = OTHER; note = bicyclic nucleic acid (BNA)
  modified_base 5..6: mod_base = OTHER; note = bicyclic nucleic acid (BNA)
  modified_base 2: mod_base = OTHER; note = 5-methyl
  modified_base 14: mod_base = OTHER; note = 5-methyl
  modified_base 19: mod_base = OTHER; note = 5-methyl
  source 1..22: mol_type = other DNA
tcaaggaagatggcatttctag

SEQ ID NO: 14584 - DNA, 22 bp, synthetic construct
  misc_feature 1..22: note = Description of Artificial Sequence: Synthetic Antisense oligonucleotide
  modified_base 1..2: mod_base = OTHER; note = bicyclic nucleic acid (BNA)
  modified_base 9: mod_base = OTHER; note = bicyclic nucleic acid (BNA)
  modified_base 12: mod_base = OTHER; note = bicyclic nucleic acid (BNA)
  modified_base 2: mod_base = OTHER; note = 5-methyl
  modified_base 14: mod_base = OTHER; note = 5-methyl
  modified_base 19: mod_base = OTHER; note = 5-methyl
  source 1..22: mol_type = other DNA
tcaaggaagatggcatttctag

SEQ ID NO: 14585 - DNA, 22 bp, synthetic construct
  misc_feature 1..22: note = Description of Artificial Sequence: Synthetic Antisense oligonucleotide
  modified_base 1..2: mod_base = OTHER; note = bicyclic nucleic acid (BNA)
  modified_base 13: mod_base = OTHER; note = bicyclic nucleic acid (BNA)
  modified_base 19: mod_base = OTHER; note = bicyclic nucleic acid (BNA)
  modified_base 2: mod_base = OTHER; note = 5-methyl
  modified_base 14: mod_base = OTHER; note = 5-methyl
  modified_base 19: mod_base = OTHER; note = 5-methyl
  source 1..22: mol_type = other DNA
tcaaggaagatggcatttctag

SEQ ID NO: 14586 - DNA, 22 bp, synthetic construct
  misc_feature 1..22: note = Description of Artificial Sequence: Synthetic Antisense oligonucleotide
  modified_base 1..2: mod_base = OTHER; note = bicyclic nucleic acid (BNA)
  modified_base 12..13: mod_base = OTHER; note = bicyclic nucleic acid (BNA)
  modified_base 2: mod_base = OTHER; note = 5-methyl
  modified_base 14: mod_base = OTHER; note = 5-methyl
  modified_base 19: mod_base = OTHER; note = 5-methyl
  source 1..22: mol_type = other DNA
tcaaggaagatggcatttctag

SEQ ID NO: 14587 - DNA, 22 bp, synthetic construct
  misc_feature 1..22: note = Description of Artificial Sequence: Synthetic Antisense oligonucleotide
  modified_base 1..2: mod_base = OTHER; note = bicyclic nucleic acid (BNA)
  modified_base 5: mod_base = OTHER; note = bicyclic nucleic acid (BNA)
  modified_base 12: mod_base = OTHER; note = bicyclic nucleic acid (BNA)
  modified_base 2: mod_base = OTHER; note = 5-methyl
  modified_base 14: mod_base = OTHER; note = 5-methyl
  modified_base 19: mod_base = OTHER; note = 5-methyl
  source 1..22: mol_type = other DNA
tcaaggaagatggcatttctag

SEQ ID NO: 14588 - DNA, 22 bp, synthetic construct
  misc_feature 1..22: note = Description of Artificial Sequence: Synthetic Antisense oligonucleotide
  modified_base 1..2: mod_base = OTHER; note = bicyclic nucleic acid (BNA)
  modified_base 9: mod_base = OTHER; note = bicyclic nucleic acid (BNA)
  modified_base 13: mod_base = OTHER; note = bicyclic nucleic acid (BNA)
  modified_base 2: mod_base = OTHER; note = 5-methyl
  modified_base 14: mod_base = OTHER; note = 5-methyl
  modified_base 19: mod_base = OTHER; note = 5-methyl
  source 1..22: mol_type = other DNA
tcaaggaagatggcatttctag

SEQ ID NO: 14589 - DNA, 22 bp, synthetic construct
  misc_feature 1..22: note = Description of Artificial Sequence: Synthetic Antisense oligonucleotide
  modified_base 1..2: mod_base = OTHER; note = bicyclic nucleic acid (BNA)
  modified_base 14: mod_base = OTHER; note = bicyclic nucleic acid (BNA)
  modified_base 19: mod_base = OTHER; note = bicyclic nucleic acid (BNA)
  modified_base 2: mod_base = OTHER; note = 5-methyl
  modified_base 14: mod_base = OTHER; note = 5-methyl
  modified_base 19: mod_base = OTHER; note = 5-methyl
  source 1..22: mol_type = other DNA
tcaaggaagatggcatttctag

SEQ ID NO: 14590 - DNA, 22 bp, synthetic construct
  misc_feature 1..22: note = Description of Artificial Sequence: Synthetic Antisense oligonucleotide
  modified_base 1..2: mod_base = OTHER; note = bicyclic nucleic acid (BNA)
  modified_base 9: mod_base = OTHER; note = bicyclic nucleic acid (BNA)
  modified_base 19: mod_base = OTHER; note = bicyclic nucleic acid (BNA)
  modified_base 2: mod_base = OTHER; note = 5-methyl
  modified_base 14: mod_base = OTHER; note = 5-methyl
  modified_base 19: mod_base = OTHER; note = 5-methyl
  source 1..22: mol_type = other DNA
tcaaggaagatggcatttctag

SEQ ID NO: 14591 - RNA, 18 nt, synthetic construct
  misc_feature 1..18: note = Description of Artificial Sequence: Synthetic Antisense oligonucleotide
  modified_base 2: mod_base = OTHER; note = bicyclic nucleic acid (BNA)
  modified_base 17..18: mod_base = OTHER; note = bicyclic nucleic acid (BNA)
  source 1..18: mol_type = other RNA
ggtaagttctgtccaagc

SEQ ID NO: 14592 - RNA, 18 nt, synthetic construct
  misc_feature 1..18: note = Description of Artificial Sequence: Synthetic Antisense oligonucleotide
  modified_base 9: mod_base = OTHER; note = bicyclic nucleic acid (BNA)
  modified_base 17..18: mod_base = OTHER; note = bicyclic nucleic acid (BNA)
  source 1..18: mol_type = other RNA
ggtaagttctgtccaagc

SEQ ID NO: 14593 - RNA, 18 nt, synthetic construct
  misc_feature 1..18: note = Description of Artificial Sequence: Synthetic Antisense oligonucleotide
  modified_base 11: mod_base = OTHER; note = bicyclic nucleic acid (BNA)
  modified_base 17..18: mod_base = OTHER; note = bicyclic nucleic acid (BNA)
  source 1..18: mol_type = other RNA
ggtaagttctgtccaagc

SEQ ID NO: 14594 - RNA, 18 nt, synthetic construct
  misc_feature 1..18: note = Description of Artificial Sequence: Synthetic Antisense oligonucleotide
  modified_base 6: mod_base = OTHER; note = bicyclic nucleic acid (BNA)
  modified_base 17..18: mod_base = OTHER; note = bicyclic nucleic acid (BNA)
  source 1..18: mol_type = other RNA
ggtaagttctgtccaagc

SEQ ID NO: 14595 - RNA, 18 nt, synthetic construct
  misc_feature 1..18: note = Description of Artificial Sequence: Synthetic Antisense oligonucleotide
  modified_base 13: mod_base = OTHER; note = bicyclic nucleic acid (BNA)
  modified_base 17..18: mod_base = OTHER; note = bicyclic nucleic acid (BNA)
  source 1..18: mol_type = other RNA
ggtaagttctgtccaagc

SEQ ID NO: 14596 - RNA, 18 nt, synthetic construct
  misc_feature 1..18: note = Description of Artificial Sequence: Synthetic Antisense oligonucleotide
  modified_base 14: mod_base = OTHER; note = bicyclic nucleic acid (BNA)
  modified_base 17..18: mod_base = OTHER; note = bicyclic nucleic acid (BNA)
  source 1..18: mol_type = other RNA
ggtaagttctgtccaagc

SEQ ID NO: 14597 - RNA, 18 nt, synthetic construct
  misc_feature 1..18: note = Description of Artificial Sequence: Synthetic Antisense oligonucleotide
  modified_base 16..18: mod_base = OTHER; note = bicyclic nucleic acid (BNA)
  source 1..18: mol_type = other RNA
gtaagttctgtccaagcc

SEQ ID NO: 14598 - RNA, 18 nt, synthetic construct
  misc_feature 1..18: note = Description of Artificial Sequence: Synthetic Antisense oligonucleotide
  modified_base 10: mod_base = OTHER; note = bicyclic nucleic acid (BNA)
  modified_base 17..18: mod_base = OTHER; note = bicyclic nucleic acid (BNA)
  source 1..18: mol_type = other RNA
gtaagttctgtccaagcc

SEQ ID NO: 14599 - RNA, 18 nt, synthetic construct
  misc_feature 1..18: note = Description of Artificial Sequence: Synthetic Antisense oligonucleotide
  modified_base 5: mod_base = OTHER; note = bicyclic nucleic acid (BNA)
  modified_base 17..18: mod_base = OTHER; note = bicyclic nucleic acid (BNA)
  source 1..18: mol_type = other RNA
gtaagttctgtccaagcc

SEQ ID NO: 14600 - RNA, 18 nt, synthetic construct
  misc_feature 1..18: note = Description of Artificial Sequence: Synthetic Antisense oligonucleotide
  modified_base 12: mod_base = OTHER; note = bicyclic nucleic acid (BNA)
  modified_base 17..18: mod_base = OTHER; note = bicyclic nucleic acid (BNA)
  source 1..18: mol_type = other RNA
gtaagttctgtccaagcc

SEQ ID NO: 14601 - RNA, 18 nt, synthetic construct
  misc_feature 1..18: note = Description of Artificial Sequence: Synthetic Antisense oligonucleotide
  modified_base 13: mod_base = OTHER; note = bicyclic nucleic acid (BNA)
  modified_base 17..18: mod_base = OTHER; note = bicyclic nucleic acid (BNA)
  source 1..18: mol_type = other RNA
gtaagttctgtccaagcc

SEQ ID NO: 14602 - RNA, 18 nt, synthetic construct
  misc_feature 1..18: note = Description of Artificial Sequence: Synthetic Antisense oligonucleotide
  modified_base 8: mod_base = OTHER; note = bicyclic nucleic acid (BNA)
  modified_base 17..18: mod_base = OTHER; note = bicyclic nucleic acid (BNA)
  source 1..18: mol_type = other RNA
gtaagttctgtccaagcc

SEQ ID NO: 14603 - RNA, 18 nt, synthetic construct
  misc_feature 1..18: note = Description of Artificial Sequence: Synthetic Antisense oligonucleotide
  modified_base 2: mod_base = OTHER; note = bicyclic nucleic acid (BNA)
  modified_base 17..18: mod_base = OTHER; note = bicyclic nucleic acid (BNA)
  source 1..18: mol_type = other RNA
agtcggtaagttctgtcc

SEQ ID NO: 14604 - RNA, 18 nt, synthetic construct
  misc_feature 1..18: note = Description of Artificial Sequence: Synthetic Antisense oligonucleotide
  modified_base 4: mod_base = OTHER; note = bicyclic nucleic acid (BNA)
  modified_base 17..18: mod_base = OTHER; note = bicyclic nucleic acid (BNA)
  source 1..18: mol_type = other RNA
agtcggtaagttctgtcc

SEQ ID NO: 14605 - RNA, 18 nt, synthetic construct
  misc_feature 1..18: note = Description of Artificial Sequence: Synthetic Antisense oligonucleotide
  modified_base 10: mod_base = OTHER; note = bicyclic nucleic acid (BNA)
  modified_base 17..18: mod_base = OTHER; note = bicyclic nucleic acid (BNA)
  source 1..18: mol_type = other RNA
agtcggtaagttctgtcc

SEQ ID NO: 14606 - RNA, 18 nt, synthetic construct
  misc_feature 1..18: note = Description of Artificial Sequence: Synthetic Antisense oligonucleotide
  modified_base 5: mod_base = OTHER; note = bicyclic nucleic acid (BNA)
  modified_base 17..18: mod_base = OTHER; note = bicyclic nucleic acid (BNA)
  source 1..18: mol_type = other RNA
agtcggtaagttctgtcc

SEQ ID NO: 14607 - RNA, 18 nt, synthetic construct
  misc_feature 1..18: note = Description of Artificial Sequence: Synthetic Antisense oligonucleotide
  modified_base 6: mod_base = OTHER; note = bicyclic nucleic acid (BNA)
  modified_base 17..18: mod_base = OTHER; note = bicyclic nucleic acid (BNA)
  source 1..18: mol_type = other RNA
agtcggtaagttctgtcc

SEQ ID NO: 14608 - RNA, 18 nt, synthetic construct
  misc_feature 1..18: note = Description of Artificial Sequence: Synthetic Antisense oligonucleotide
  modified_base 13: mod_base = OTHER; note = bicyclic nucleic acid (BNA)
  modified_base 17..18: mod_base = OTHER; note = bicyclic nucleic acid (BNA)
  source 1..18: mol_type = other RNA
agtcggtaagttctgtcc

SEQ ID NO: 14609 - RNA, 18 nt, synthetic construct
  misc_feature 1..18: note = Description of Artificial Sequence: Synthetic Antisense oligonucleotide
  modified_base 15: mod_base = OTHER; note = bicyclic nucleic acid (BNA)
  modified_base 17..18: mod_base = OTHER; note = bicyclic nucleic acid (BNA)
  source 1..18: mol_type = other RNA
agtcggtaagttctgtcc

SEQ ID NO: 14610 - RNA, 18 nt, synthetic construct
  misc_feature 1..18: note = Description of Artificial Sequence: Synthetic Antisense oligonucleotide
  modified_base 3: mod_base = OTHER; note = bicyclic nucleic acid (BNA)
  modified_base 17..18: mod_base = OTHER; note = bicyclic nucleic acid (BNA)
  source 1..18: mol_type = other RNA
ctgtccaagcccggttga

SEQ ID NO: 14611 - RNA, 18 nt, synthetic construct
  misc_feature 1..18: note = Description of Artificial Sequence: Synthetic Antisense oligonucleotide
  modified_base 9: mod_base = OTHER; note = bicyclic nucleic acid (BNA)
  modified_base 17..18: mod_base = OTHER; note = bicyclic nucleic acid (BNA)
  source 1..18: mol_type = other RNA
ctgtccaagcccggttga

SEQ ID NO: 14612 - RNA, 18 nt, synthetic construct
  misc_feature 1..18: note = Description of Artificial Sequence: Synthetic Antisense oligonucleotide
  modified_base 10: mod_base = OTHER; note = bicyclic nucleic acid (BNA)
  modified_base 17..18: mod_base = OTHER; note = bicyclic nucleic acid (BNA)
  source 1..18: mol_type = other RNA
ctgtccaagcccggttga

SEQ ID NO: 14613 - RNA, 18 nt, synthetic construct
  misc_feature 1..18: note = Description of Artificial Sequence: Synthetic Antisense oligonucleotide
  modified_base 5: mod_base = OTHER; note = bicyclic nucleic acid (BNA)
  modified_base 17..18: mod_base = OTHER; note = bicyclic nucleic acid (BNA)
  source 1..18: mol_type = other RNA
ctgtccaagcccggttga

SEQ ID NO: 14614 - RNA, 18 nt, synthetic construct
  misc_feature 1..18: note = Description of Artificial Sequence: Synthetic Antisense oligonucleotide
  modified_base 11: mod_base = OTHER; note = bicyclic nucleic acid (BNA)
  modified_base 17..18: mod_base = OTHER; note = bicyclic nucleic acid (BNA)
  source 1..18: mol_type = other RNA
ctgtccaagcccggttga

SEQ ID NO: 14615 - RNA, 18 nt, synthetic construct
  misc_feature 1..18: note = Description of Artificial Sequence: Synthetic Antisense oligonucleotide
  modified_base 6: mod_base = OTHER; note = bicyclic nucleic acid (BNA)
  modified_base 17..18: mod_base = OTHER; note = bicyclic nucleic acid (BNA)
  source 1..18: mol_type = other RNA
ctgtccaagcccggttga

SEQ ID NO: 14616 - RNA, 18 nt, synthetic construct
  misc_feature 1..18: note = Description of Artificial Sequence: Synthetic Antisense oligonucleotide
  modified_base 12: mod_base = OTHER; note = bicyclic nucleic acid (BNA)
  modified_base 17..18: mod_base = OTHER; note = bicyclic nucleic acid (BNA)
  source 1..18: mol_type = other RNA
ctgtccaagcccggttga

SEQ ID NO: 14617 - RNA, 18 nt, synthetic construct
  misc_feature 1..18: note = Description of Artificial Sequence: Synthetic Antisense oligonucleotide
  modified_base 13: mod_base = OTHER; note = bicyclic nucleic acid (BNA)
  modified_base 17..18: mod_base = OTHER; note = bicyclic nucleic acid (BNA)
  source 1..18: mol_type = other RNA
ctgtccaagcccggttga

SEQ ID NO: 14618 - RNA, 18 nt, synthetic construct
  misc_feature 1..18: note = Description of Artificial Sequence: Synthetic Antisense oligonucleotide
  modified_base 14: mod_base = OTHER; note = bicyclic nucleic acid (BNA)
  modified_base 17..18: mod_base = OTHER; note = bicyclic nucleic acid (BNA)
  source 1..18: mol_type = other RNA
ctgtccaagcccggttga

SEQ ID NO: 14619 - RNA, 18 nt, synthetic construct
  misc_feature 1..18: note = Description of Artificial Sequence: Synthetic Antisense oligonucleotide
  modified_base 6: mod_base = OTHER; note = bicyclic nucleic acid (BNA)
  modified_base 11: mod_base = OTHER; note = bicyclic nucleic acid (BNA)
  modified_base 17..18: mod_base = OTHER; note = bicyclic nucleic acid (BNA)
  source 1..18: mol_type = other RNA
ggtaagttctgtccaagc

SEQ ID NO: 14620 - RNA, 18 nt, synthetic construct
  misc_feature 1..18: note = Description of Artificial Sequence: Synthetic Antisense oligonucleotide
  modified_base 9: mod_base = OTHER; note = bicyclic nucleic acid (BNA)
  modified_base 14: mod_base = OTHER; note = bicyclic nucleic acid (BNA)
  modified_base 17..18: mod_base = OTHER; note = bicyclic nucleic acid (BNA)
  source 1..18: mol_type = other RNA
ggtaagttctgtccaagc

SEQ ID NO: 14621 - RNA, 18 nt, synthetic construct
  misc_feature 1..18: note = Description of Artificial Sequence: Synthetic Antisense oligonucleotide
  modified_base 2: mod_base = OTHER; note = bicyclic nucleic acid (BNA)
  modified_base 13: mod_base = OTHER; note = bicyclic nucleic acid (BNA)
  modified_base 17..18: mod_base = OTHER; note = bicyclic nucleic acid (BNA)
  source 1..18: mol_type = other RNA
ggtaagttctgtccaagc

SEQ ID NO: 14622 - RNA, 18 nt, synthetic construct
  misc_feature 1..18: note = Description of Artificial Sequence: Synthetic Antisense oligonucleotide
  modified_base 9: mod_base = OTHER; note = bicyclic nucleic acid (BNA)
  modified_base 13: mod_base = OTHER; note = bicyclic nucleic acid (BNA)
  modified_base 17..18: mod_base = OTHER; note = bicyclic nucleic acid (BNA)
  source 1..18: mol_type = other RNA
ggtaagttctgtccaagc

SEQ ID NO: 14623 - RNA, 18 nt, synthetic construct
  misc_feature 1..18: note = Description of Artificial Sequence: Synthetic Antisense oligonucleotide
  modified_base 13..14: mod_base = OTHER; note = bicyclic nucleic acid (BNA)
  modified_base 17..18: mod_base = OTHER; note = bicyclic nucleic acid (BNA)
  source 1..18: mol_type = other RNA
ggtaagttctgtccaagc

SEQ ID NO: 14624 - RNA, 18 nt, synthetic construct
  misc_feature 1..18: note = Description of Artificial Sequence: Synthetic Antisense oligonucleotide
  modified_base 2: mod_base = OTHER; note = bicyclic nucleic acid (BNA)
  modified_base 14: mod_base = OTHER; note = bicyclic nucleic acid (BNA)
  modified_base 17..18: mod_base = OTHER; note = bicyclic nucleic acid (BNA)
  source 1..18: mol_type = other RNA
ggtaagttctgtccaagc

SEQ ID NO: 14625 - RNA, 18 nt, synthetic construct
  misc_feature 1..18: note = Description of Artificial Sequence: Synthetic Antisense oligonucleotide
  modified_base 11: mod_base = OTHER; note = bicyclic nucleic acid (BNA)
  modified_base 14: mod_base = OTHER; note = bicyclic nucleic acid (BNA)
  modified_base 17..18: mod_base = OTHER; note = bicyclic nucleic acid (BNA)
  source 1..18: mol_type = other RNA
ggtaagttctgtccaagc

SEQ ID NO: 14626 - RNA, 18 nt, synthetic construct
  misc_feature 1..18: note = Description of Artificial Sequence: Synthetic Antisense oligonucleotide
  modified_base 6: mod_base = OTHER; note = bicyclic nucleic acid (BNA)
  modified_base 13: mod_base = OTHER; note = bicyclic nucleic acid (BNA)
  modified_base 17..18: mod_base = OTHER; note = bicyclic nucleic acid (BNA)
  source 1..18: mol_type = other RNA
ggtaagttctgtccaagc

SEQ ID NO: 14627 - RNA, 18 nt, synthetic construct
  misc_feature 1..18: note = Description of Artificial Sequence: Synthetic Antisense oligonucleotide
  modified_base 6: mod_base = OTHER; note = bicyclic nucleic acid (BNA)
  modified_base 14: mod_base = OTHER; note = bicyclic nucleic acid (BNA)
  modified_base 17..18: mod_base = OTHER; note = bicyclic nucleic acid (BNA)
  source 1..18: mol_type = other RNA
ggtaagttctgtccaagc

SEQ ID NO: 14628 - RNA, 18 nt, synthetic construct
  misc_feature 1..18: note = Description of Artificial Sequence: Synthetic Antisense oligonucleotide
  modified_base 9: mod_base = OTHER; note = bicyclic nucleic acid (BNA)
  modified_base 11: mod_base = OTHER; note = bicyclic nucleic acid (BNA)
  modified_base 17..18: mod_base = OTHER; note = bicyclic nucleic acid (BNA)
  source 1..18: mol_type = other RNA
ggtaagttctgtccaagc

SEQ ID NO: 14629 - RNA, 18 nt, synthetic construct
  misc_feature 1..18: note = Description of Artificial Sequence: Synthetic Antisense oligonucleotide
  modified_base 11: mod_base = OTHER; note = bicyclic nucleic acid (BNA)
  modified_base 13: mod_base = OTHER; note = bicyclic nucleic acid (BNA)
  modified_base 17..18: mod_base = OTHER; note = bicyclic nucleic acid (BNA)
  source 1..18: mol_type = other RNA
ggtaagttctgtccaagc

SEQ ID NO: 14630 - RNA, 18 nt, synthetic construct
  misc_feature 1..18: note = Description of Artificial Sequence: Synthetic Antisense oligonucleotide
  modified_base 2: mod_base = OTHER; note = bicyclic nucleic acid (BNA)
  modified_base 6: mod_base = OTHER; note = bicyclic nucleic acid (BNA)
  modified_base 17..18: mod_base = OTHER; note = bicyclic nucleic acid (BNA)
  source 1..18: mol_type = other RNA
ggtaagttctgtccaagc

SEQ ID NO: 14631 - RNA, 18 nt, synthetic construct
  misc_feature 1..18: note = Description of Artificial Sequence: Synthetic Antisense oligonucleotide
  modified_base 2: mod_base = OTHER; note = bicyclic nucleic acid (BNA)
  modified_base 9: mod_base = OTHER; note = bicyclic nucleic acid (BNA)
  modified_base 17..18: mod_base = OTHER; note = bicyclic nucleic acid (BNA)
  source 1..18: mol_type = other RNA
ggtaagttctgtccaagc

SEQ ID NO: 14632 - RNA, 18 nt, synthetic construct
  misc_feature 1..18: note = Description of Artificial Sequence: Synthetic Antisense oligonucleotide
  modified_base 2: mod_base = OTHER; note = bicyclic nucleic acid (BNA)
  modified_base 11: mod_base = OTHER; note = bicyclic nucleic acid (BNA)
  modified_base 17..18: mod_base = OTHER; note = bicyclic nucleic acid (BNA)
  source 1..18: mol_type = other RNA
ggtaagttctgtccaagc

SEQ ID NO: 14633 - RNA, 18 nt, synthetic construct
  misc_feature 1..18: note = Description of Artificial Sequence: Synthetic Antisense oligonucleotide
  modified_base 6: mod_base = OTHER; note = bicyclic nucleic acid (BNA)
  modified_base 9: mod_base = OTHER; note = bicyclic nucleic acid (BNA)
  modified_base 17..18: mod_base = OTHER; note = bicyclic nucleic acid (BNA)
  source 1..18: mol_type = other RNA
ggtaagttctgtccaagc

SEQ ID NO: 14634 - RNA, 18 nt, synthetic construct
  misc_feature 1..18: note = Description of Artificial Sequence: Synthetic Antisense oligonucleotide
  modified_base 5: mod_base = OTHER; note = bicyclic nucleic acid (BNA)
  modified_base 8: mod_base = OTHER; note = bicyclic nucleic acid (BNA)
  modified_base 17..18: mod_base = OTHER; note = bicyclic nucleic acid (BNA)
  source 1..18: mol_type = other RNA
gtaagttctgtccaagcc

SEQ ID NO: 14635 - RNA, 18 nt, synthetic construct
  misc_feature 1..18: note = Description of Artificial Sequence: Synthetic Antisense oligonucleotide
  modified_base 13: mod_base = OTHER; note = bicyclic nucleic acid (BNA)
  modified_base 16..18: mod_base = OTHER; note = bicyclic nucleic acid (BNA)
  source 1..18: mol_type = other RNA
gtaagttctgtccaagcc

SEQ ID NO: 14636 - RNA, 18 nt, synthetic construct
  misc_feature 1..18: note = Description of Artificial Sequence: Synthetic Antisense oligonucleotide
  modified_base 5: mod_base = OTHER; note = bicyclic nucleic acid (BNA)
  modified_base 10: mod_base = OTHER; note = bicyclic nucleic acid (BNA)
  modified_base 17..18: mod_base = OTHER; note = bicyclic nucleic acid (BNA)
  source 1..18: mol_type = other RNA
gtaagttctgtccaagcc

SEQ ID NO: 14637 - RNA, 18 nt, synthetic construct
  misc_feature 1..18: note = Description of Artificial Sequence: Synthetic Antisense oligonucleotide
  modified_base 8: mod_base = OTHER; note = bicyclic nucleic acid (BNA)
  modified_base 16..18: mod_base = OTHER; note = bicyclic nucleic acid (BNA)
  source 1..18: mol_type = other RNA
gtaagttctgtccaagcc

SEQ ID NO: 14638 - RNA, 18 nt, synthetic construct
  misc_feature 1..18: note = Description of Artificial Sequence: Synthetic Antisense oligonucleotide
  modified_base 10: mod_base = OTHER; note = bicyclic nucleic acid (BNA)
  modified_base 16..18: mod_base = OTHER; note = bicyclic nucleic acid (BNA)
  source 1..18: mol_type = other RNA
gtaagttctgtccaagcc

SEQ ID NO: 14639 - RNA, 18 nt, synthetic construct
  misc_feature 1..18: note = Description of Artificial Sequence: Synthetic Antisense oligonucleotide
  modified_base 8: mod_base = OTHER; note = bicyclic nucleic acid (BNA)
  modified_base 13: mod_base = OTHER; note = bicyclic nucleic acid (BNA)
  modified_base 17..18: mod_base = OTHER; note = bicyclic nucleic acid (BNA)
  source 1..18: mol_type = other RNA
gtaagttctgtccaagcc

SEQ ID NO: 14640 - RNA, 18 nt, synthetic construct
  misc_feature 1..18: note = Description of Artificial Sequence: Synthetic Antisense oligonucleotide
  modified_base 5: mod_base = OTHER; note = bicyclic nucleic acid (BNA)
  modified_base 16..18: mod_base = OTHER; note = bicyclic nucleic acid (BNA)
  source 1..18: mol_type = other RNA
gtaagttctgtccaagcc

SEQ ID NO: 14641 - RNA, 18 nt, synthetic construct
  misc_feature 1..18: note = Description of Artificial Sequence: Synthetic Antisense oligonucleotide
  modified_base 10: mod_base = OTHER; note = bicyclic nucleic acid (BNA)
  modified_base 13: mod_base = OTHER; note = bicyclic nucleic acid (BNA)
  modified_base 17..18: mod_base = OTHER; note = bicyclic nucleic acid (BNA)
  source 1..18: mol_type = other RNA
gtaagttctgtccaagcc

SEQ ID NO: 14642 - RNA, 18 nt, synthetic construct
  misc_feature 1..18: note = Description of Artificial Sequence: Synthetic Antisense oligonucleotide
  modified_base 5: mod_base = OTHER; note = bicyclic nucleic acid (BNA)
  modified_base 13: mod_base = OTHER; note = bicyclic nucleic acid (BNA)
  modified_base 17..18: mod_base = OTHER; note = bicyclic nucleic acid (BNA)
  source 1..18: mol_type = other RNA
gtaagttctgtccaagcc

SEQ ID NO: 14643 - RNA, 18 nt, synthetic construct
  misc_feature 1..18: note = Description of Artificial Sequence: Synthetic Antisense oligonucleotide
  modified_base 10: mod_base = OTHER; note = bicyclic nucleic acid (BNA)
  modified_base 12: mod_base = OTHER; note = bicyclic nucleic acid (BNA)
  modified_base 17..18: mod_base = OTHER; note = bicyclic nucleic acid (BNA)
  source 1..18: mol_type = other RNA
gtaagttctgtccaagcc

SEQ ID NO: 14644 - RNA, 18 nt, synthetic construct
  misc_feature 1..18: note = Description of Artificial Sequence: Synthetic Antisense oligonucleotide
  modified_base 8: mod_base = OTHER; note = bicyclic nucleic acid (BNA)
  modified_base 12: mod_base = OTHER; note = bicyclic nucleic acid (BNA)
  modified_base 17..18: mod_base = OTHER; note = bicyclic nucleic acid (BNA)
  source 1..18: mol_type = other RNA
gtaagttctgtccaagcc

SEQ ID NO: 14645 - RNA, 18 nt, synthetic construct
  misc_feature 1..18: note = Description of Artificial Sequence: Synthetic Antisense oligonucleotide
  modified_base 12: mod_base = OTHER; note = bicyclic nucleic acid (BNA)
  modified_base 16..18: mod_base = OTHER; note = bicyclic nucleic acid (BNA)
  source 1..18: mol_type = other RNA
gtaagttctgtccaagcc

SEQ ID NO: 14646 - RNA, 18 nt, synthetic construct
  misc_feature 1..18: note = Description of Artificial Sequence: Synthetic Antisense oligonucleotide
  modified_base 12..13: mod_base = OTHER; note = bicyclic nucleic acid (BNA)
  modified_base 17..18: mod_base = OTHER; note = bicyclic nucleic acid (BNA)
  source 1..18: mol_type = other RNA
gtaagttctgtccaagcc

SEQ ID NO: 14647 - RNA, 18 nt, synthetic construct
  misc_feature 1..18: note = Description of Artificial Sequence: Synthetic Antisense oligonucleotide
  modified_base 5: mod_base = OTHER; note = bicyclic nucleic acid (BNA)
  modified_base 12: mod_base = OTHER; note = bicyclic nucleic acid (BNA)
  modified_base 17..18: mod_base = OTHER; note = bicyclic nucleic acid (BNA)
  source 1..18: mol_type = other RNA
gtaagttctgtccaagcc

SEQ ID NO: 14648 - RNA, 18 nt, synthetic construct
  misc_feature 1..18: note = Description of Artificial Sequence: Synthetic Antisense oligonucleotide
  modified_base 8: mod_base = OTHER; note = bicyclic nucleic acid (BNA)
  modified_base 10: mod_base = OTHER; note = bicyclic nucleic acid (BNA)
  modified_base 17..18: mod_base = OTHER; note = bicyclic nucleic acid (BNA)
  source 1..18: mol_type = other RNA
gtaagttctgtccaagcc

SEQ ID NO: 14649 - RNA, 18 nt, synthetic construct
  misc_feature 1..18: note = Description of Artificial Sequence: Synthetic Antisense oligonucleotide
  modified_base 6: mod_base = OTHER; note = bicyclic nucleic acid (BNA)
  modified_base 10: mod_base = OTHER; note = bicyclic nucleic acid (BNA)
  modified_base 17..18: mod_base = OTHER; note = bicyclic nucleic acid (BNA)
  source 1..18: mol_type = other RNA
agtcggtaagttctgtcc

SEQ ID NO: 14650 - RNA, 18 nt, synthetic construct
  misc_feature 1..18: note = Description of Artificial Sequence: Synthetic Antisense oligonucleotide
  modified_base 2: mod_base = OTHER; note = bicyclic nucleic acid (BNA)
  modified_base 4: mod_base = OTHER; note = bicyclic nucleic acid (BNA)
  modified_base 17..18: mod_base = OTHER; note = bicyclic nucleic acid (BNA)
  source 1..18: mol_type = other RNA
agtcggtaagttctgtcc

SEQ ID NO: 14651 - RNA, 18 nt, synthetic construct
  misc_feature 1..18: note = Description of Artificial Sequence: Synthetic Antisense oligonucleotide
  modified_base 5: mod_base = OTHER; note = bicyclic nucleic acid (BNA)
  modified_base 13: mod_base = OTHER; note = bicyclic nucleic acid (BNA)
  modified_base 17..18: mod_base = OTHER; note = bicyclic nucleic acid (BNA)
  source 1..18: mol_type = other RNA
agtcggtaagttctgtcc

SEQ ID NO: 14652 - RNA, 18 nt, synthetic construct
  misc_feature 1..18: note = Description of Artificial Sequence: Synthetic Antisense oligonucleotide
  modified_base 4: mod_base = OTHER; note = bicyclic nucleic acid (BNA)
  modified_base 15: mod_base = OTHER; note = bicyclic nucleic acid (BNA)
  modified_base 17..18: mod_base = OTHER; note = bicyclic nucleic acid (BNA)
  source 1..18: mol_type = other RNA
agtcggtaagttctgtcc

SEQ ID NO: 14653 - RNA, 18 nt, synthetic construct
  misc_feature 1..18: note = Description of Artificial Sequence: Synthetic Antisense oligonucleotide
  modified_base 5: mod_base = OTHER; note = bicyclic nucleic acid (BNA)
  modified_base 10: mod_base = OTHER; note = bicyclic nucleic acid (BNA)
  modified_base 17..18: mod_base = OTHER; note = bicyclic nucleic acid (BNA)
  source 1..18: mol_type = other RNA
agtcggtaagttctgtcc

SEQ ID NO: 14654 - RNA, 18 nt, synthetic construct
  misc_feature 1..18: note = Description of Artificial Sequence: Synthetic Antisense oligonucleotide
  modified_base 6: mod_base = OTHER; note = bicyclic nucleic acid (BNA)
  modified_base 13: mod_base = OTHER; note = bicyclic nucleic acid (BNA)
  modified_base 17..18: mod_base = OTHER; note = bicyclic nucleic acid (BNA)
  source 1..18: mol_type = other RNA
agtcggtaagttctgtcc

SEQ ID NO: 14655 - RNA, 18 nt, synthetic construct
  misc_feature 1..18: note = Description of Artificial Sequence: Synthetic Antisense oligonucleotide
  modified_base 2: mod_base = OTHER; note = bicyclic nucleic acid (BNA)
  modified_base 15: mod_base = OTHER; note = bicyclic nucleic acid (BNA)
  modified_base 17..18: mod_base = OTHER; note = bicyclic nucleic acid (BNA)
  source 1..18: mol_type = other RNA
agtcggtaagttctgtcc

SEQ ID NO: 14656 - RNA, 18 nt, synthetic construct
  misc_feature 1..18: note = Description of Artificial Sequence: Synthetic Antisense oligonucleotide
  modified_base 2: mod_base = OTHER; note = bicyclic nucleic acid (BNA)
  modified_base 6: mod_base = OTHER; note = bicyclic nucleic acid (BNA)
  modified_base 17..18: mod_base = OTHER; note = bicyclic nucleic acid (BNA)
  source 1..18: mol_type = other RNA
agtcggtaagttctgtcc

SEQ ID NO: 14657 - RNA, 18 nt, synthetic construct
  misc_feature 1..18: note = Description of Artificial Sequence: Synthetic Antisense oligonucleotide
  modified_base 10: mod_base = OTHER; note = bicyclic nucleic acid (BNA)
  modified_base 15: mod_base = OTHER; note = bicyclic nucleic acid (BNA)
  modified_base 17..18: mod_base = OTHER; note = bicyclic nucleic acid (BNA)
  source 1..18: mol_type = other RNA
agtcggtaagttctgtcc

SEQ ID NO: 14658 - RNA, 18 nt, synthetic construct
  misc_feature 1..18: note = Description of Artificial Sequence: Synthetic Antisense oligonucleotide
  modified_base 13: mod_base = OTHER; note = bicyclic nucleic acid (BNA)
  modified_base 15: mod_base = OTHER; note = bicyclic nucleic acid (BNA)
  modified_base 17..18: mod_base = OTHER; note = bicyclic nucleic acid (BNA)
  source 1..18: mol_type = other RNA
agtcggtaagttctgtcc

SEQ ID NO: 14659 - RNA, 18 nt, synthetic construct
  misc_feature 1..18: note = Description of Artificial Sequence: Synthetic Antisense oligonucleotide
  modified_base 5..6: mod_base = OTHER; note = bicyclic nucleic acid (BNA)
  modified_base 17..18: mod_base = OTHER; note = bicyclic nucleic acid (BNA)
  source 1..18: mol_type = other RNA
agtcggtaagttctgtcc

SEQ ID NO: 14660 - RNA, 18 nt, synthetic construct
  misc_feature 1..18: note = Description of Artificial Sequence: Synthetic Antisense oligonucleotide
  modified_base 5: mod_base = OTHER; note = bicyclic nucleic acid (BNA)
  modified_base 15: mod_base = OTHER; note = bicyclic nucleic acid (BNA)
  modified_base 17..18: mod_base = OTHER; note = bicyclic nucleic acid (BNA)
  source 1..18: mol_type = other RNA
agtcggtaagttctgtcc

SEQ ID NO: 14661 - RNA, 18 nt, synthetic construct
  misc_feature 1..18: note = Description of Artificial Sequence: Synthetic Antisense oligonucleotide
  modified_base 2: mod_base = OTHER; note = bicyclic nucleic acid (BNA)
  modified_base 5: mod_base = OTHER; note = bicyclic nucleic acid (BNA)
  modified_base 17..18: mod_base = OTHER; note = bicyclic nucleic acid (BNA)
  source 1..18: mol_type = other RNA
agtcggtaagttctgtcc

SEQ ID NO: 14662 - RNA, 18 nt, synthetic construct
  misc_feature 1..18: note = Description of Artificial Sequence: Synthetic Antisense oligonucleotide
  modified_base 4: mod_base = OTHER; note = bicyclic nucleic acid (BNA)
  modified_base 10: mod_base = OTHER; note = bicyclic nucleic acid (BNA)
  modified_base 17..18: mod_base = OTHER; note = bicyclic nucleic acid (BNA)
  source 1..18: mol_type = other RNA
agtcggtaagttctgtcc

SEQ ID NO: 14663 - RNA, 18 nt, synthetic construct
  misc_feature 1..18: note = Description of Artificial Sequence: Synthetic Antisense oligonucleotide
  modified_base 2: mod_base = OTHER; note = bicyclic nucleic acid (BNA)
  modified_base 10: mod_base = OTHER; note = bicyclic nucleic acid (BNA)
  modified_base 17..18: mod_base = OTHER; note = bicyclic nucleic acid (BNA)
  source 1..18: mol_type = other RNA
agtcggtaagttctgtcc

SEQ ID NO: 14664 - RNA, 18 nt, synthetic construct
  misc_feature 1..18: note = Description of Artificial Sequence: Synthetic Antisense oligonucleotide
  modified_base 4: mod_base = OTHER; note = bicyclic nucleic acid (BNA)
  modified_base 6: mod_base = OTHER; note = bicyclic nucleic acid (BNA)
  modified_base 17..18: mod_base = OTHER; note = bicyclic nucleic acid (BNA)
  source 1..18: mol_type = other RNA
agtcggtaagttctgtcc

SEQ ID NO: 14665 - RNA, 18 nt, synthetic construct
  misc_feature 1..18: note = Description of Artificial Sequence: Synthetic Antisense oligonucleotide
  modified_base 4: mod_base = OTHER; note = bicyclic nucleic acid (BNA)
  modified_base 13: mod_base = OTHER; note = bicyclic nucleic acid (BNA)
  modified_base 17..18: mod_base = OTHER; note = bicyclic nucleic acid (BNA)
  source 1..18: mol_type = other RNA
agtcggtaagttctgtcc

SEQ ID NO: 14666 - RNA, 18 nt, synthetic construct
  misc_feature 1..18: note = Description of Artificial Sequence: Synthetic Antisense oligonucleotide
  modified_base 2: mod_base = OTHER; note = bicyclic nucleic acid (BNA)
  modified_base 13: mod_base = OTHER; note = bicyclic nucleic acid (BNA)
  modified_base 17..18: mod_base = OTHER; note = bicyclic nucleic acid (BNA)
  source 1..18: mol_type = other RNA
agtcggtaagttctgtcc

SEQ ID NO: 14667 - RNA, 18 nt, synthetic construct
  misc_feature 1..18: note = Description of Artificial Sequence: Synthetic Antisense oligonucleotide
  modified_base 6: mod_base = OTHER; note = bicyclic nucleic acid (BNA)
  modified_base 15: mod_base = OTHER; note = bicyclic nucleic acid (BNA)
  modified_base 17..18: mod_base = OTHER; note = bicyclic nucleic acid (BNA)
  source 1..18: mol_type = other RNA
agtcggtaagttctgtcc

SEQ ID NO: 14668 - RNA, 18 nt, synthetic construct
  misc_feature 1..18: note = Description of Artificial Sequence: Synthetic Antisense oligonucleotide
  modified_base 4..5: mod_base = OTHER; note = bicyclic nucleic acid (BNA)
  modified_base 17..18: mod_base = OTHER; note = bicyclic nucleic acid (BNA)
  source 1..18: mol_type = other RNA
agtcggtaagttctgtcc

SEQ ID NO: 14669 - RNA, 18 nt, synthetic construct
  misc_feature 1..18: note = Description of Artificial Sequence: Synthetic Antisense oligonucleotide
  modified_base 10: mod_base = OTHER; note = bicyclic nucleic acid (BNA)
  modified_base 13: mod_base = OTHER; note = bicyclic nucleic acid (BNA)
  modified_base 17..18: mod_base = OTHER; note = bicyclic nucleic acid (BNA)
  source 1..18: mol_type = other RNA
agtcggtaagttctgtcc

SEQ ID NO: 14670 - RNA, 18 nt, synthetic construct
  misc_feature 1..18: note = Description of Artificial Sequence: Synthetic Antisense oligonucleotide
  modified_base 6: mod_base = OTHER; note = bicyclic nucleic acid (BNA)
  modified_base 10: mod_base = OTHER; note = bicyclic nucleic acid (BNA)
  modified_base 17..18: mod_base = OTHER; note = bicyclic nucleic acid (BNA)
  source 1..18: mol_type = other RNA
ctgtccaagcccggttga

SEQ ID NO: 14671 - RNA, 18 nt, synthetic construct
  misc_feature 1..18: note = Description of Artificial Sequence: Synthetic Antisense oligonucleotide
  modified_base 9: mod_base = OTHER; note = bicyclic nucleic acid (BNA)
  modified_base 14: mod_base = OTHER; note = bicyclic nucleic acid (BNA)
  modified_base 17..18: mod_base = OTHER; note = bicyclic nucleic acid (BNA)
  source 1..18: mol_type = other RNA
ctgtccaagcccggttga

SEQ ID NO: 14672 - RNA, 18 nt, synthetic construct
  misc_feature 1..18: note = Description of Artificial Sequence: Synthetic Antisense oligonucleotide
  modified_base 11..12: mod_base = OTHER; note = bicyclic nucleic acid (BNA)
  modified_base 17..18: mod_base = OTHER; note = bicyclic nucleic acid (BNA)
  source 1..18: mol_type = other RNA
ctgtccaagcccggttga

SEQ ID NO: 14673 - RNA, 18 nt, synthetic construct
  misc_feature 1..18: note = Description of Artificial Sequence: Synthetic Antisense oligonucleotide
  modified_base 5: mod_base = OTHER; note = bicyclic nucleic acid (BNA)
  modified_base 9: mod_base = OTHER; note = bicyclic nucleic acid (BNA)
  modified_base 17..18: mod_base = OTHER; note = bicyclic nucleic acid (BNA)
  source 1..18: mol_type = other RNA
ctgtccaagcccggttga

SEQ ID NO: 14674 - RNA, 18 nt, synthetic construct
  misc_feature 1..18: note = Description of Artificial Sequence: Synthetic Antisense oligonucleotide
  modified_base 3: mod_base = OTHER; note = bicyclic nucleic acid (BNA)
  modified_base 9: mod_base = OTHER; note = bicyclic nucleic acid (BNA)
  modified_base 17..18: mod_base = OTHER; note = bicyclic nucleic acid (BNA)
  source 1..18: mol_type = other RNA
ctgtccaagcccggttga

SEQ ID NO: 14675 - RNA, 18 nt, synthetic construct
  misc_feature 1..18: note = Description of Artificial Sequence: Synthetic Antisense oligonucleotide
  modified_base 6: mod_base = OTHER; note = bicyclic nucleic acid (BNA)
  modified_base 14: mod_base = OTHER; note = bicyclic nucleic acid (BNA)
  modified_base 17..18: mod_base = OTHER; note = bicyclic nucleic acid (BNA)
  source 1..18: mol_type = other RNA
ctgtccaagcccggttga

SEQ ID NO: 14676 - RNA, 18 nt, synthetic construct
  misc_feature 1..18: note = Description of Artificial Sequence: Synthetic Antisense oligonucleotide
  modified_base 9..10: mod_base = OTHER; note = bicyclic nucleic acid (BNA)
  modified_base 17..18: mod_base = OTHER; note = bicyclic nucleic acid (BNA)
  source 1..18: mol_type = other RNA
ctgtccaagcccggttga

SEQ ID NO: 14677 - RNA, 18 nt, synthetic construct
  misc_feature 1..18: note = Description of Artificial Sequence: Synthetic Antisense oligonucleotide
  modified_base 5: mod_base = OTHER; note = bicyclic nucleic acid (BNA)
  modified_base 13: mod_base = OTHER; note = bicyclic nucleic acid (BNA)
  modified_base 17..18: mod_base = OTHER; note = bicyclic nucleic acid (BNA)
  source 1..18: mol_type = other RNA
ctgtccaagcccggttga

SEQ ID NO: 14678 - RNA, 18 nt, synthetic construct
  misc_feature 1..18: note = Description of Artificial Sequence: Synthetic Antisense oligonucleotide
  modified_base 3: mod_base = OTHER; note = bicyclic nucleic acid (BNA)
  modified_base 13: mod_base = OTHER; note = bicyclic nucleic acid (BNA)
  modified_base 17..18: mod_base = OTHER; note = bicyclic nucleic acid (BNA)
  source 1..18: mol_type = other RNA
ctgtccaagcccggttga

SEQ ID NO: 14679 - RNA, 18 nt, synthetic construct
  misc_feature 1..18: note = Description of Artificial Sequence: Synthetic Antisense oligonucleotide
  modified_base 3: mod_base = OTHER; note = bicyclic nucleic acid (BNA)
  modified_base 6: mod_base = OTHER; note = bicyclic nucleic acid (BNA)
  modified_base 17..18: mod_base = OTHER; note = bicyclic nucleic acid (BNA)
  source 1..18: mol_type = other RNA
ctgtccaagcccggttga

SEQ ID NO: 14680 - RNA, 18 nt, synthetic construct
  misc_feature 1..18: note = Description of Artificial Sequence: Synthetic Antisense oligonucleotide
  modified_base 6: mod_base = OTHER; note = bicyclic nucleic acid (BNA)
  modified_base 9: mod_base = OTHER; note = bicyclic nucleic acid (BNA)
  modified_base 17..18: mod_base = OTHER; note = bicyclic nucleic acid (BNA)
  source 1..18: mol_type = other RNA
ctgtccaagcccggttga

SEQ ID NO: 14681 - RNA, 18 nt, synthetic construct
  misc_feature 1..18: note = Description of Artificial Sequence: Synthetic Antisense oligonucleotide
  modified_base 5: mod_base = OTHER; note = bicyclic nucleic acid (BNA)
  modified_base 10: mod_base = OTHER; note = bicyclic nucleic acid (BNA)
  modified_base 17..18: mod_base = OTHER; note = bicyclic nucleic acid (BNA)
  source 1..18: mol_type = other RNA
ctgtccaagcccggttga

SEQ ID NO: 14682 - RNA, 18 nt, synthetic construct
  misc_feature 1..18: note = Description of Artificial Sequence: Synthetic Antisense oligonucleotide
  modified_base 3: mod_base = OTHER; note = bicyclic nucleic acid (BNA)
  modified_base 10: mod_base = OTHER; note = bicyclic nucleic acid (BNA)
  modified_base 17..18: mod_base = OTHER; note = bicyclic nucleic acid (BNA)
  source 1..18: mol_type = other RNA
ctgtccaagcccggttga

SEQ ID NO: 14683 - RNA, 18 nt, synthetic construct
  misc_feature 1..18: note = Description of Artificial Sequence: Synthetic Antisense oligonucleotide
  modified_base 13..14: mod_base = OTHER; note = bicyclic nucleic acid (BNA)
  modified_base 17..18: mod_base = OTHER; note = bicyclic nucleic acid (BNA)
  source 1..18: mol_type = other RNA
ctgtccaagcccggttga

SEQ ID NO: 14684 - RNA, 18 nt, synthetic construct
  misc_feature 1..18: note = Description of Artificial Sequence: Synthetic Antisense oligonucleotide
  modified_base 6: mod_base = OTHER; note = bicyclic nucleic acid (BNA)
  modified_base 13: mod_base = OTHER; note = bicyclic nucleic acid (BNA)
  modified_base 17..18: mod_base = OTHER; note = bicyclic nucleic acid (BNA)
  source 1..18: mol_type = other RNA
ctgtccaagcccggttga

SEQ ID NO: 14685 - RNA, 18 nt, synthetic construct
  misc_feature 1..18: note = Description of Artificial Sequence: Synthetic Antisense oligonucleotide
  modified_base 9: mod_base = OTHER; note = bicyclic nucleic acid (BNA)
  modified_base 11: mod_base = OTHER; note = bicyclic nucleic acid (BNA)
  modified_base 17..18: mod_base = OTHER; note = bicyclic nucleic acid (BNA)
  source 1..18: mol_type = other RNA
ctgtccaagcccggttga

SEQ ID NO: 14686 - RNA, 18 nt, synthetic construct
  misc_feature 1..18: note = Description of Artificial Sequence: Synthetic Antisense oligonucleotide
  modified_base 11: mod_base = OTHER; note = bicyclic nucleic acid (BNA)
  modified_base 13: mod_base = OTHER; note = bicyclic nucleic acid (BNA)
  modified_base 17..18: mod_base = OTHER; note = bicyclic nucleic acid (BNA)
  source 1..18: mol_type = other RNA
ctgtccaagcccggttga

SEQ ID NO: 14687 - RNA, 18 nt, synthetic construct
  misc_feature 1..18: note = Description of Artificial Sequence: Synthetic Antisense oligonucleotide
  modified_base 5: mod_base = OTHER; note = bicyclic nucleic acid (BNA)
  modified_base 14: mod_base = OTHER; note = bicyclic nucleic acid (BNA)
  modified_base 17..18: mod_base = OTHER; note = bicyclic nucleic acid (BNA)
  source 1..18: mol_type = other RNA
ctgtccaagcccggttga

SEQ ID NO: 14688 - RNA, 18 nt, synthetic construct
  misc_feature 1..18: note = Description of Artificial Sequence: Synthetic Antisense oligonucleotide
  modified_base 3: mod_base = OTHER; note = bicyclic nucleic acid (BNA)
  modified_base 14: mod_base = OTHER; note = bicyclic nucleic acid (BNA)
  modified_base 17..18: mod_base = OTHER; note = bicyclic nucleic acid (BNA)
  source 1..18: mol_type = other RNA
ctgtccaagcccggttga

SEQ ID NO: 14689 - RNA, 18 nt, synthetic construct
  misc_feature 1..18: note = Description of Artificial Sequence: Synthetic Antisense oligonucleotide
  modified_base 10: mod_base = OTHER; note = bicyclic nucleic acid (BNA)
  modified_base 12: mod_base = OTHER; note = bicyclic nucleic acid (BNA)
  modified_base 17..18: mod_base = OTHER; note = bicyclic nucleic acid (BNA)
  source 1..18: mol_type = other RNA
ctgtccaagcccggttga

SEQ ID NO: 14690 - RNA, 18 nt, synthetic construct
  misc_feature 1..18: note = Description of Artificial Sequence: Synthetic Antisense oligonucleotide
  modified_base 12: mod_base = OTHER; note = bicyclic nucleic acid (BNA)
  modified_base 14: mod_base = OTHER; note = bicyclic nucleic acid (BNA)
  modified_base 17..18: mod_base = OTHER; note = bicyclic nucleic acid (BNA)
  source 1..18: mol_type = other RNA
ctgtccaagcccggttga

SEQ ID NO: 14691 - RNA, 18 nt, synthetic construct
  misc_feature 1..18: note = Description of Artificial Sequence: Synthetic Antisense oligonucleotide
  modified_base 5: mod_base = OTHER; note = bicyclic nucleic acid (BNA)
  modified_base 11: mod_base = OTHER; note = bicyclic nucleic acid (BNA)
  modified_base 17..18: mod_base = OTHER; note = bicyclic nucleic acid (BNA)
  source 1..18: mol_type = other RNA
ctgtccaagcccggttga

SEQ ID NO: 14692 - RNA, 18 nt, synthetic construct
  misc_feature 1..18: note = Description of Artificial Sequence: Synthetic Antisense oligonucleotide
  modified_base 6: mod_base = OTHER; note = bicyclic nucleic acid (BNA)
  modified_base 12: mod_base = OTHER; note = bicyclic nucleic acid (BNA)
  modified_base 17..18: mod_base = OTHER; note = bicyclic nucleic acid (BNA)
  source 1..18: mol_type = other RNA
ctgtccaagcccggttga

SEQ ID NO: 14693 - RNA, 18 nt, synthetic construct
  misc_feature 1..18: note = Description of Artificial Sequence: Synthetic Antisense oligonucleotide
  modified_base 5..6: mod_base = OTHER; note = bicyclic nucleic acid (BNA)
  modified_base 17..18: mod_base = OTHER; note = bicyclic nucleic acid (BNA)
  source 1..18: mol_type = other RNA
ctgtccaagcccggttga

SEQ ID NO: 14694 - RNA, 18 nt, synthetic construct
  misc_feature 1..18: note = Description of Artificial Sequence: Synthetic Antisense oligonucleotide
  modified_base 11: mod_base = OTHER; note = bicyclic nucleic acid (BNA)
  modified_base 14: mod_base = OTHER; note = bicyclic nucleic acid (BNA)
  modified_base 17..18: mod_base = OTHER; note = bicyclic nucleic acid (BNA)
  source 1..18: mol_type = other RNA
ctgtccaagcccggttga

SEQ ID NO: 14695 - RNA, 18 nt, synthetic construct
  misc_feature 1..18: note = Description of Artificial Sequence: Synthetic Antisense oligonucleotide
  modified_base 9: mod_base = OTHER; note = bicyclic nucleic acid (BNA)
  modified_base 12: mod_base = OTHER; note = bicyclic nucleic acid (BNA)
  modified_base 17..18: mod_base = OTHER; note = bicyclic nucleic acid (BNA)
  source 1..18: mol_type = other RNA
ctgtccaagcccggttga

SEQ ID NO: 14696 - RNA, 18 nt, synthetic construct
  misc_feature 1..18: note = Description of Artificial Sequence: Synthetic Antisense oligonucleotide
  modified_base 3: mod_base = OTHER; note = bicyclic nucleic acid (BNA)
  modified_base 11: mod_base = OTHER; note = bicyclic nucleic acid (BNA)
  modified_base 17..18: mod_base = OTHER; note = bicyclic nucleic acid (BNA)
  source 1..18: mol_type = other RNA
ctgtccaagcccggttga

SEQ ID NO: 14697 - RNA, 18 nt, synthetic construct
  misc_feature 1..18: note = Description of Artificial Sequence: Synthetic Antisense oligonucleotide
  modified_base 10..11: mod_base = OTHER; note = bicyclic nucleic acid (BNA)
  modified_base 17..18: mod_base = OTHER; note = bicyclic nucleic acid (BNA)
  source 1..18: mol_type = other RNA
ctgtccaagcccggttga

SEQ ID NO: 14698 - RNA, 18 nt, synthetic construct
  misc_feature 1..18: note = Description of Artificial Sequence: Synthetic Antisense oligonucleotide
  modified_base 12..13: mod_base = OTHER; note = bicyclic nucleic acid (BNA)
  modified_base 17..18: mod_base = OTHER; note = bicyclic nucleic acid (BNA)
  source 1..18: mol_type = other RNA
ctgtccaagcccggttga

SEQ ID NO: 14699 - RNA, 18 nt, synthetic construct
  misc_feature 1..18: note = Description of Artificial Sequence: Synthetic Antisense oligonucleotide
  modified_base 5: mod_base = OTHER; note = bicyclic nucleic acid (BNA)
  modified_base 12: mod_base = OTHER; note = bicyclic nucleic acid (BNA)
  modified_base 17..18: mod_base = OTHER; note = bicyclic nucleic acid (BNA)
  source 1..18: mol_type = other RNA
ctgtccaagcccggttga

SEQ ID NO: 14700 - RNA, 18 nt, synthetic construct
  misc_feature 1..18: note = Description of Artificial Sequence: Synthetic Antisense oligonucleotide
  modified_base 10: mod_base = OTHER; note = bicyclic nucleic acid (BNA)
  modified_base 14: mod_base = OTHER; note = bicyclic nucleic acid (BNA)
  modified_base 17..18: mod_base = OTHER; note = bicyclic nucleic acid (BNA)
  source 1..18: mol_type = other RNA
ctgtccaagcccggttga

SEQ ID NO: 14701 - RNA, 18 nt, synthetic construct
  misc_feature 1..18: note = Description of Artificial Sequence: Synthetic Antisense oligonucleotide
  modified_base 6: mod_base = OTHER; note = bicyclic nucleic acid (BNA)
  modified_base 11: mod_base = OTHER; note = bicyclic nucleic acid (BNA)
  modified_base 17..18: mod_base = OTHER; note = bicyclic nucleic acid (BNA)
  source 1..18: mol_type = other RNA
ctgtccaagcccggttga

SEQ ID NO: 14702 - RNA, 18 nt, synthetic construct
  misc_feature 1..18: note = Description of Artificial Sequence: Synthetic Antisense oligonucleotide
  modified_base 9: mod_base = OTHER; note = bicyclic nucleic acid (BNA)
  modified_base 13: mod_base = OTHER; note = bicyclic nucleic acid (BNA)
  modified_base 17..18: mod_base = OTHER; note = bicyclic nucleic acid (BNA)
  source 1..18: mol_type = other RNA
ctgtccaagcccggttga

SEQ ID NO: 14703 - RNA, 18 nt, synthetic construct
  misc_feature 1..18: note = Description of Artificial Sequence: Synthetic Antisense oligonucleotide
  modified_base 3: mod_base = OTHER; note = bicyclic nucleic acid (BNA)
  modified_base 12: mod_base = OTHER; note = bicyclic nucleic acid (BNA)
  modified_base 17..18: mod_base = OTHER; note = bicyclic nucleic acid (BNA)
  source 1..18: mol_type = other RNA
ctgtccaagcccggttga

SEQ ID NO: 14704 - RNA, 18 nt, synthetic construct
  misc_feature 1..18: note = Description of Artificial Sequence: Synthetic Antisense oligonucleotide
  modified_base 3: mod_base = OTHER; note = bicyclic nucleic acid (BNA)
  modified_base 5: mod_base = OTHER; note = bicyclic nucleic acid (BNA)
  modified_base 17..18: mod_base = OTHER; note = bicyclic nucleic acid (BNA)
  source 1..18: mol_type = other RNA
ctgtccaagcccggttga

SEQ ID NO: 14705 - RNA, 18 nt, synthetic construct
  misc_feature 1..18: note = Description of Artificial Sequence: Synthetic Antisense oligonucleotide
  modified_base 10: mod_base = OTHER; note = bicyclic nucleic acid (BNA)
  modified_base 13: mod_base = OTHER; note = bicyclic nucleic acid (BNA)
  modified_base 17..18: mod_base = OTHER; note = bicyclic nucleic acid (BNA)
  source 1..18: mol_type = other RNA
ctgtccaagcccggttga

SEQ ID NO: 14706 - DNA, 20 bp, synthetic construct
  misc_feature 1..20: note = Description of Artificial Sequence: Synthetic Antisense oligonucleotide
  misc_feature 1..20: note = Original Sequence: ucaaggaagauggcauuuct
  modified_base 2: mod_base = OTHER; note = bicyclic nucleic acid (BNA)
  modified_base 19..20: mod_base = OTHER; note = bicyclic nucleic acid (BNA)
  source 1..20: mol_type = other DNA
  modified_base 1: mod_base = OTHER; note = Uracil
  modified_base 11: mod_base = OTHER; note = Uracil
  modified_base 16: mod_base = OTHER; note = Uracil
  modified_base 17: mod_base = OTHER; note = Uracil
  modified_base 18: mod_base = OTHER; note = Uracil
tcaaggaagatggcatttct

SEQ ID NO: 14707 - DNA, 20 bp, synthetic construct
  misc_feature 1..20: note = Description of Artificial Sequence: Synthetic Antisense oligonucleotide
  misc_feature 1..20: note = Original Sequence: ucaaggaagauggcauuuct
  modified_base 9: mod_base = OTHER; note = bicyclic nucleic acid (BNA)
  modified_base 19..20: mod_base = OTHER; note = bicyclic nucleic acid (BNA)
  source 1..20: mol_type = other DNA
  modified_base 1: mod_base = OTHER; note = Uracil
  modified_base 11: mod_base = OTHER; note = Uracil
  modified_base 16: mod_base = OTHER; note = Uracil
  modified_base 17: mod_base = OTHER; note = Uracil
  modified_base 18: mod_base = OTHER; note = Uracil
tcaaggaagatggcatttct

SEQ ID NO: 14708 - DNA, 20 bp, synthetic construct
  misc_feature 1..20: note = Description of Artificial Sequence: Synthetic Antisense oligonucleotide
  misc_feature 1..20: note = Original Sequence: ucaaggaagauggcauuuct
  modified_base 5: mod_base = OTHER; note = bicyclic nucleic acid (BNA)
  modified_base 19..20: mod_base = OTHER; note = bicyclic nucleic acid (BNA)
  source 1..20: mol_type = other DNA
  modified_base 1: mod_base = OTHER; note = Uracil
  modified_base 11: mod_base = OTHER; note = Uracil
  modified_base 16: mod_base = OTHER; note = Uracil
  modified_base 17: mod_base = OTHER; note = Uracil
  modified_base 18: mod_base = OTHER; note = Uracil
tcaaggaagatggcatttct

SEQ ID NO: 14709 - DNA, 20 bp, synthetic construct
  misc_feature 1..20: note = Description of Artificial Sequence: Synthetic Antisense oligonucleotide
  misc_feature 1..20: note = Original Sequence: ucaaggaagauggcauuuct
  modified_base 6: mod_base = OTHER; note = bicyclic nucleic acid (BNA)
  modified_base 19..20: mod_base = OTHER; note = bicyclic nucleic acid (BNA)
  source 1..20: mol_type = other DNA
  modified_base 1: mod_base = OTHER; note = Uracil
  modified_base 11: mod_base = OTHER; note = Uracil
  modified_base 16: mod_base = OTHER; note = Uracil
  modified_base 17: mod_base = OTHER; note = Uracil
  modified_base 18: mod_base = OTHER; note = Uracil
tcaaggaagatggcatttct

SEQ ID NO: 14710 - DNA, 20 bp, synthetic construct
  misc_feature 1..20: note = Description of Artificial Sequence: Synthetic Antisense oligonucleotide
  misc_feature 1..20: note = Original Sequence: ucaaggaagauggcauuuct
  modified_base 12: mod_base = OTHER; note = bicyclic nucleic acid (BNA)
  modified_base 19..20: mod_base = OTHER; note = bicyclic nucleic acid (BNA)
  source 1..20: mol_type = other DNA
  modified_base 1: mod_base = OTHER; note = Uracil
  modified_base 11: mod_base = OTHER; note = Uracil
  modified_base 16: mod_base = OTHER; note = Uracil
  modified_base 17: mod_base = OTHER; note = Uracil
  modified_base 18: mod_base = OTHER; note = Uracil
tcaaggaagatggcatttct

SEQ ID NO: 14711 - DNA, 20 bp, synthetic construct
  misc_feature 1..20: note = Description of Artificial Sequence: Synthetic Antisense oligonucleotide
  misc_feature 1..20: note = Original Sequence: ucaaggaagauggcauuuct
  modified_base 13: mod_base = OTHER; note = bicyclic nucleic acid (BNA)
  modified_base 19..20: mod_base = OTHER; note = bicyclic nucleic acid (BNA)
  source 1..20: mol_type = other DNA
  modified_base 1: mod_base = OTHER; note = Uracil
  modified_base 11: mod_base = OTHER; note = Uracil
  modified_base 16: mod_base = OTHER; note = Uracil
  modified_base 17: mod_base = OTHER; note = Uracil
  modified_base 18: mod_base = OTHER; note = Uracil
tcaaggaagatggcatttct

SEQ ID NO: 14712 - DNA, 20 bp, synthetic construct
  misc_feature 1..20: note = Description of Artificial Sequence: Synthetic Antisense oligonucleotide
  misc_feature 1..20: note = Original Sequence: ucaaggaagauggcauuuct
  modified_base 14: mod_base = OTHER; note = bicyclic nucleic acid (BNA)
  modified_base 19..20: mod_base = OTHER; note = bicyclic nucleic acid (BNA)
  source 1..20: mol_type = other DNA
  modified_base 1: mod_base = OTHER; note = Uracil
  modified_base 11: mod_base = OTHER; note = Uracil
  modified_base 16: mod_base = OTHER; note = Uracil
  modified_base 17: mod_base = OTHER; note = Uracil
  modified_base 18: mod_base = OTHER; note = Uracil
tcaaggaagatggcatttct

SEQ ID NO: 14713 - RNA, 22 nt, synthetic construct
  misc_feature 1..22: note = Description of Artificial Sequence: Synthetic Antisense oligonucleotide
  modified_base 2: mod_base = OTHER; note = bicyclic nucleic acid (BNA)
  modified_base 21..22: mod_base = OTHER; note = bicyclic nucleic acid (BNA)
  source 1..22: mol_type = other RNA
tcaaggaagatggcatttctag

SEQ ID NO: 14714 - RNA, 22 nt, synthetic construct
  misc_feature 1..22: note = Description of Artificial Sequence: Synthetic Antisense oligonucleotide
  modified_base 9: mod_base = OTHER; note = bicyclic nucleic acid (BNA)
  modified_base 21..22: mod_base = OTHER; note = bicyclic nucleic acid (BNA)
  source 1..22: mol_type = other RNA
tcaaggaagatggcatttctag

SEQ ID NO: 14715 - RNA, 22 nt, synthetic construct
  misc_feature 1..22: note = Description of Artificial Sequence: Synthetic Antisense oligonucleotide
  modified_base 5: mod_base = OTHER; note = bicyclic nucleic acid (BNA)
  modified_base 21..22: mod_base = OTHER; note = bicyclic nucleic acid (BNA)
  source 1..22: mol_type = other RNA
tcaaggaagatggcatttctag

SEQ ID NO: 14716 - RNA, 22 nt, synthetic construct
  misc_feature 1..22: note = Description of Artificial Sequence: Synthetic Antisense oligonucleotide
  modified_base 6: mod_base = OTHER; note = bicyclic nucleic acid (BNA)
  modified_base 21..22: mod_base = OTHER; note = bicyclic nucleic acid (BNA)
  source 1..22: mol_type = other RNA
tcaaggaagatggcatttctag

SEQ ID NO: 14717 - RNA, 22 nt, synthetic construct
  misc_feature 1..22: note = Description of Artificial Sequence: Synthetic Antisense oligonucleotide
  modified_base 12: mod_base = OTHER; note = bicyclic nucleic acid (BNA)
  modified_base 21..22: mod_base = OTHER; note = bicyclic nucleic acid (BNA)
  source 1..22: mol_type = other RNA
tcaaggaagatggcatttctag

SEQ ID NO: 14718 - RNA, 22 nt, synthetic construct
  misc_feature 1..22: note = Description of Artificial Sequence: Synthetic Antisense oligonucleotide
  modified_base 13: mod_base = OTHER; note = bicyclic nucleic acid (BNA)
  modified_base 21..22: mod_base = OTHER; note = bicyclic nucleic acid (BNA)
  source 1..22: mol_type = other RNA
tcaaggaagatggcatttctag

SEQ ID NO: 14719 - RNA, 22 nt, synthetic construct
  misc_feature 1..22: note = Description of Artificial Sequence: Synthetic Antisense oligonucleotide
  modified_base 19: mod_base = OTHER; note = bicyclic nucleic acid (BNA)
  modified_base 21..22: mod_base = OTHER; note = bicyclic nucleic acid (BNA)
  source 1..22: mol_type = other RNA
tcaaggaagatggcatttctag

SEQ ID NO: 14720 - RNA, 22 nt, synthetic construct
  misc_feature 1..22: note = Description of Artificial Sequence: Synthetic Antisense oligonucleotide
  modified_base 14: mod_base = OTHER; note = bicyclic nucleic acid (BNA)
  modified_base 21..22: mod_base = OTHER; note = bicyclic nucleic acid (BNA)
  source 1..22: mol_type = other RNA
tcaaggaagatggcatttctag

SEQ ID NO: 14721 - DNA, 20 bp, synthetic construct
  misc_feature 1..20: note = Description of Artificial Sequence: Synthetic Antisense oligonucleotide
  misc_feature 1..20: note = Original Sequence: ucaaggaagauggcauuuct
  modified_base 9: mod_base = OTHER; note = bicyclic nucleic acid (BNA)
  modified_base 14: mod_base = OTHER; note = bicyclic nucleic acid (BNA)
  modified_base 19..20: mod_base = OTHER; note = bicyclic nucleic acid (BNA)
  source 1..20: mol_type = other DNA
  modified_base 1: mod_base = OTHER; note = Uracil
  modified_base 11: mod_base = OTHER; note = Uracil
  modified_base 16: mod_base = OTHER; note = Uracil
  modified_base 17: mod_base = OTHER; note = Uracil
  modified_base 18: mod_base = OTHER; note = Uracil
tcaaggaagatggcatttct

SEQ ID NO: 14722 - DNA, 20 bp, synthetic construct
  misc_feature 1..20: note = Description of Artificial Sequence: Synthetic Antisense oligonucleotide
  misc_feature 1..20: note = Original Sequence: ucaaggaagauggcauuuct
  modified_base 5: mod_base = OTHER; note = bicyclic nucleic acid (BNA)
  modified_base 9: mod_base = OTHER; note = bicyclic nucleic acid (BNA)
  modified_base 19..20: mod_base = OTHER; note = bicyclic nucleic acid (BNA)
  source 1..20: mol_type = other DNA
  modified_base 1: mod_base = OTHER; note = Uracil
  modified_base 11: mod_base = OTHER; note = Uracil
  modified_base 16: mod_base = OTHER; note = Uracil
  modified_base 17: mod_base = OTHER; note = Uracil
  modified_base 18: mod_base = OTHER; note = Uracil
tcaaggaagatggcatttct

SEQ ID NO: 14723 - DNA, 20 bp, synthetic construct
  misc_feature 1..20: note = Description of Artificial Sequence: Synthetic Antisense oligonucleotide
  misc_feature 1..20: note = Original Sequence: ucaaggaagauggcauuuct
  modified_base 6: mod_base = OTHER; note = bicyclic nucleic acid (BNA)
  modified_base 14: mod_base = OTHER; note = bicyclic nucleic acid (BNA)
  modified_base 19..20: mod_base = OTHER; note = bicyclic nucleic acid (BNA)
  source 1..20: mol_type = other DNA
  modified_base 1: mod_base = OTHER; note = Uracil
  modified_base 11: mod_base = OTHER; note = Uracil
  modified_base 16: mod_base = OTHER; note = Uracil
  modified_base 17: mod_base = OTHER; note = Uracil
  modified_base 18: mod_base = OTHER; note = Uracil
tcaaggaagatggcatttct

SEQ ID NO: 14724 - DNA, 20 bp, synthetic construct
  misc_feature 1..20: note = Description of Artificial Sequence: Synthetic Antisense oligonucleotide
  misc_feature 1..20: note = Original Sequence: ucaaggaagauggcauuuct
  modified_base 5: mod_base = OTHER; note = bicyclic nucleic acid (BNA)
  modified_base 13: mod_base = OTHER; note = bicyclic nucleic acid (BNA)
  modified_base 19..20: mod_base = OTHER; note = bicyclic nucleic acid (BNA)
  source 1..20: mol_type = other DNA
  modified_base 1: mod_base = OTHER; note = Uracil
  modified_base 11: mod_base = OTHER; note = Uracil
  modified_base 16: mod_base = OTHER; note = Uracil
  modified_base 17: mod_base = OTHER; note = Uracil
  modified_base 18: mod_base = OTHER; note = Uracil
tcaaggaagatggcatttct

SEQ ID NO: 14725 - DNA, 20 bp, synthetic construct
  misc_feature 1..20: note = Description of Artificial Sequence: Synthetic Antisense oligonucleotide
  misc_feature 1..20: note = Original Sequence: ucaaggaagauggcauuuct
  modified_base 2: mod_base = OTHER; note = bicyclic nucleic acid (BNA)
  modified_base 12: mod_base = OTHER; note = bicyclic nucleic acid (BNA)
  modified_base 19..20: mod_base = OTHER; note = bicyclic nucleic acid (BNA)
  source 1..20: mol_type = other DNA
  modified_base 1: mod_base = OTHER; note = Uracil
  modified_base 11: mod_base = OTHER; note = Uracil
  modified_base 16: mod_base = OTHER; note = Uracil
  modified_base 17: mod_base = OTHER; note = Uracil
  modified_base 18: mod_base = OTHER; note = Uracil
tcaaggaagatggcatttct

SEQ ID NO: 14726 - DNA, 20 bp, synthetic construct
  misc_feature 1..20: note = Description of Artificial Sequence: Synthetic Antisense oligonucleotide
  misc_feature 1..20: note = Original Sequence: ucaaggaagauggcauuuct
  modified_base 6: mod_base = OTHER; note = bicyclic nucleic acid (BNA)
  modified_base 9: mod_base = OTHER; note = bicyclic nucleic acid (BNA)
  modified_base 19..20: mod_base = OTHER; note = bicyclic nucleic acid (BNA)
  source 1..20: mol_type = other DNA
  modified_base 1: mod_base = OTHER; note = Uracil
  modified_base 11: mod_base = OTHER; note = Uracil
  modified_base 16: mod_base = OTHER; note = Uracil
  modified_base 17: mod_base = OTHER; note = Uracil
  modified_base 18: mod_base = OTHER; note = Uracil
tcaaggaagatggcatttct

SEQ ID NO: 14727 - DNA, 20 bp, synthetic construct
  misc_feature 1..20: note = Description of Artificial Sequence: Synthetic Antisense oligonucleotide
  misc_feature 1..20: note = Original Sequence: ucaaggaagauggcauuuct
  modified_base 13..14: mod_base = OTHER; note = bicyclic nucleic acid (BNA)
  modified_base 19..20: mod_base = OTHER; note = bicyclic nucleic acid (BNA)
  source 1..20: mol_type = other DNA
  modified_base 1: mod_base = OTHER; note = Uracil
  modified_base 11: mod_base = OTHER; note = Uracil
  modified_base 16: mod_base = OTHER; note = Uracil
  modified_base 17: mod_base = OTHER; note = Uracil
  modified_base 18: mod_base = OTHER; note = Uracil
tcaaggaagatggcatttct

SEQ ID NO: 14728 - DNA, 20 bp, synthetic construct
  misc_feature 1..20: note = Description of Artificial Sequence: Synthetic Antisense oligonucleotide
  misc_feature 1..20: note = Original Sequence: ucaaggaagauggcauuuct
  modified_base 6: mod_base = OTHER; note = bicyclic nucleic acid (BNA)
  modified_base 13: mod_base = OTHER; note = bicyclic nucleic acid (BNA)
  modified_base 19..20: mod_base = OTHER; note = bicyclic nucleic acid (BNA)
  source 1..20: mol_type = other DNA
  modified_base 1: mod_base = OTHER; note = Uracil
  modified_base 11: mod_base = OTHER; note = Uracil
  modified_base 16: mod_base = OTHER; note = Uracil
  modified_base 17: mod_base = OTHER; note = Uracil
  modified_base 18: mod_base = OTHER; note = Uracil
tcaaggaagatggcatttct

SEQ ID NO: 14729 - DNA, 20 bp, synthetic construct
  misc_feature 1..20: note = Description of Artificial Sequence: Synthetic Antisense oligonucleotide
  misc_feature 1..20: note = Original Sequence: ucaaggaagauggcauuuct
  modified_base 5: mod_base = OTHER; note = bicyclic nucleic acid (BNA)
  modified_base 14: mod_base = OTHER; note = bicyclic nucleic acid (BNA)
  modified_base 19..20: mod_base = OTHER; note = bicyclic nucleic acid (BNA)
  source 1..20: mol_type = other DNA
  modified_base 1: mod_base = OTHER; note = Uracil
  modified_base 11: mod_base = OTHER; note = Uracil
  modified_base 16: mod_base = OTHER; note = Uracil
  modified_base 17: mod_base = OTHER; note = Uracil
  modified_base 18: mod_base = OTHER; note = Uracil
tcaaggaagatggcatttct

SEQ ID NO: 14730 - DNA, 20 bp, synthetic construct
  misc_feature 1..20: note = Description of Artificial Sequence: Synthetic Antisense oligonucleotide
  misc_feature 1..20: note = Original Sequence: ucaaggaagauggcauuuct
  modified_base 2: mod_base = OTHER; note = bicyclic nucleic acid (BNA)
  modified_base 6: mod_base = OTHER; note = bicyclic nucleic acid (BNA)
  modified_base 19..20: mod_base = OTHER; note = bicyclic nucleic acid (BNA)
  source 1..20: mol_type = other DNA
  modified_base 1: mod_base = OTHER; note = Uracil
  modified_base 11: mod_base = OTHER; note = Uracil
  modified_base 16: mod_base = OTHER; note = Uracil
  modified_base 17: mod_base = OTHER; note = Uracil
  modified_base 18: mod_base = OTHER; note = Uracil
tcaaggaagatggcatttct

SEQ ID NO: 14731 - DNA, 20 bp, synthetic construct
  misc_feature 1..20: note = Description of Artificial Sequence: Synthetic Antisense oligonucleotide
  misc_feature 1..20: note = Original Sequence: ucaaggaagauggcauuuct
  modified_base 12: mod_base = OTHER; note = bicyclic nucleic acid (BNA)
  modified_base 14: mod_base = OTHER; note = bicyclic nucleic acid (BNA)
  modified_base 19..20: mod_base = OTHER; note = bicyclic nucleic acid (BNA)
  source 1..20: mol_type = other DNA
  modified_base 1: mod_base = OTHER; note = Uracil
  modified_base 11: mod_base = OTHER; note = Uracil
  modified_base 16: mod_base = OTHER; note = Uracil
  modified_base 17: mod_base = OTHER; note = Uracil
  modified_base 18: mod_base = OTHER; note = Uracil
tcaaggaagatggcatttct

SEQ ID NO: 14732 - DNA, 20 bp, synthetic construct
  misc_feature 1..20: note = Description of Artificial Sequence: Synthetic Antisense oligonucleotide
  misc_feature 1..20: note = Original Sequence: ucaaggaagauggcauuuct
  modified_base 6: mod_base = OTHER; note = bicyclic nucleic acid (BNA)
  modified_base 12: mod_base = OTHER; note = bicyclic nucleic acid (BNA)
  modified_base 19..20: mod_base = OTHER; note = bicyclic nucleic acid (BNA)
  source 1..20: mol_type = other DNA
  modified_base 1: mod_base = OTHER; note = Uracil
  modified_base 11: mod_base = OTHER; note = Uracil
  modified_base 16: mod_base = OTHER; note = Uracil
  modified_base 17: mod_base = OTHER; note = Uracil
  modified_base 18: mod_base = OTHER; note = Uracil
tcaaggaagatggcatttct

SEQ ID NO: 14733 - DNA, 20 bp, synthetic construct
  misc_feature 1..20: note = Description of Artificial Sequence: Synthetic Antisense oligonucleotide
  misc_feature 1..20: note = Original Sequence: ucaaggaagauggcauuuct
  modified_base 5..6: mod_base = OTHER; note = bicyclic nucleic acid (BNA)
  modified_base 19..20: mod_base = OTHER; note = bicyclic nucleic acid (BNA)
  source 1..20: mol_type = other DNA
  modified_base 1: mod_base = OTHER; note = Uracil
  modified_base 11: mod_base = OTHER; note = Uracil
  modified_base 16: mod_base = OTHER; note = Uracil
  modified_base 17: mod_base = OTHER; note = Uracil
  modified_base 18: mod_base = OTHER; note = Uracil
tcaaggaagatggcatttct

SEQ ID NO: 14734 - DNA, 20 bp, synthetic construct
  misc_feature 1..20: note = Description of Artificial Sequence: Synthetic Antisense oligonucleotide
  misc_feature 1..20: note = Original Sequence: ucaaggaagauggcauuuct
  modified_base 2: mod_base = OTHER; note = bicyclic nucleic acid (BNA)
  modified_base 14: mod_base = OTHER; note = bicyclic nucleic acid (BNA)
  modified_base 19..20: mod_base = OTHER; note = bicyclic nucleic acid (BNA)
  source 1..20: mol_type = other DNA
  modified_base 1: mod_base = OTHER; note = Uracil
  modified_base 11: mod_base = OTHER; note = Uracil
  modified_base 16: mod_base = OTHER; note = Uracil
  modified_base 17: mod_base = OTHER; note = Uracil
  modified_base 18: mod_base = OTHER; note = Uracil
tcaaggaagatggcatttct

SEQ ID NO: 14735 - DNA, 20 bp, synthetic construct
  misc_feature 1..20: note = Description of Artificial Sequence: Synthetic Antisense oligonucleotide
  misc_feature 1..20: note = Original Sequence: ucaaggaagauggcauuuct
  modified_base 9: mod_base = OTHER; note = bicyclic nucleic acid (BNA)
  modified_base 12: mod_base = OTHER; note = bicyclic nucleic acid (BNA)
  modified_base 19..20: mod_base = OTHER; note = bicyclic nucleic acid (BNA)
  source 1..20: mol_type = other DNA
  modified_base 1: mod_base = OTHER; note = Uracil
  modified_base 11: mod_base = OTHER; note = Uracil
  modified_base 16: mod_base = OTHER; note = Uracil
  modified_base 17: mod_base = OTHER; note = Uracil
  modified_base 18: mod_base = OTHER; note = Uracil
tcaaggaagatggcatttct

SEQ ID NO: 14736 - DNA, 20 bp, synthetic construct
  misc_feature 1..20: note = Description of Artificial Sequence: Synthetic Antisense oligonucleotide
  misc_feature 1..20: note = Original Sequence: ucaaggaagauggcauuuct
  modified_base 2: mod_base = OTHER; note = bicyclic nucleic acid (BNA)
  modified_base 5: mod_base = OTHER; note = bicyclic nucleic acid (BNA)
  modified_base 19..20: mod_base = OTHER; note = bicyclic nucleic acid (BNA)
  source 1..20: mol_type = other DNA
  modified_base 1: mod_base = OTHER; note = Uracil
  modified_base 11: mod_base = OTHER; note = Uracil
  modified_base 16: mod_base = OTHER; note = Uracil
  modified_base 17: mod_base = OTHER; note = Uracil
  modified_base 18: mod_base = OTHER; note = Uracil
tcaaggaagatggcatttct

SEQ ID NO: 14737 - DNA, 20 bp, synthetic construct
  misc_feature 1..20: note = Description of Artificial Sequence: Synthetic Antisense oligonucleotide
  misc_feature 1..20: note = Original Sequence: ucaaggaagauggcauuuct
  modified_base 12..13: mod_base = OTHER; note = bicyclic nucleic acid (BNA)
  modified_base 19..20: mod_base = OTHER; note = bicyclic nucleic acid (BNA)
  source 1..20: mol_type = other DNA
  modified_base 1: mod_base = OTHER; note = Uracil
  modified_base 11: mod_base = OTHER; note = Uracil
  modified_base 16: mod_base = OTHER; note = Uracil
  modified_base 17: mod_base = OTHER; note = Uracil
  modified_base 18: mod_base = OTHER; note = Uracil
tcaaggaagatggcatttct

SEQ ID NO: 14738 - DNA, 20 bp, synthetic construct
  misc_feature 1..20: note = Description of Artificial Sequence: Synthetic Antisense oligonucleotide
  misc_feature 1..20: note = Original Sequence: ucaaggaagauggcauuuct
  modified_base 5: mod_base = OTHER; note = bicyclic nucleic acid (BNA)
  modified_base 12: mod_base = OTHER; note = bicyclic nucleic acid (BNA)
  modified_base 19..20: mod_base = OTHER; note = bicyclic nucleic acid (BNA)
  source 1..20: mol_type = other DNA
  modified_base 1: mod_base = OTHER; note = Uracil
  modified_base 11: mod_base = OTHER; note = Uracil
  modified_base 16: mod_base = OTHER; note = Uracil
  modified_base 17: mod_base = OTHER; note = Uracil
  modified_base 18: mod_base = OTHER; note = Uracil
tcaaggaagatggcatttct

SEQ ID NO: 14739 - DNA, 20 bp, synthetic construct
  misc_feature 1..20: note = Description of Artificial Sequence: Synthetic Antisense oligonucleotide
  misc_feature 1..20: note = Original Sequence: ucaaggaagauggcauuuct
  modified_base 2: mod_base = OTHER; note = bicyclic nucleic acid (BNA)
  modified_base 13: mod_base = OTHER; note = bicyclic nucleic acid (BNA)
  modified_base 19..20: mod_base = OTHER; note = bicyclic nucleic acid (BNA)
  source 1..20: mol_type = other DNA
  modified_base 1: mod_base = OTHER; note = Uracil
  modified_base 11: mod_base = OTHER; note = Uracil
  modified_base 16: mod_base = OTHER; note = Uracil
  modified_base 17: mod_base = OTHER; note = Uracil
  modified_base 18: mod_base = OTHER; note = Uracil
tcaaggaagatggcatttct

SEQ ID NO: 14740 - DNA, 20 bp, synthetic construct
  misc_feature 1..20: note = Description of Artificial Sequence: Synthetic Antisense oligonucleotide
  misc_feature 1..20: note = Original Sequence: ucaaggaagauggcauuuct
  modified_base 9: mod_base = OTHER; note = bicyclic nucleic acid (BNA)
  modified_base 13: mod_base = OTHER; note = bicyclic nucleic acid (BNA)
  modified_base 19..20: mod_base = OTHER; note = bicyclic nucleic acid (BNA)
  source 1..20: mol_type = other DNA
  modified_base 1: mod_base = OTHER; note = Uracil
  modified_base 11: mod_base = OTHER; note = Uracil
  modified_base 16: mod_base = OTHER; note = Uracil
  modified_base 17: mod_base = OTHER; note = Uracil
  modified_base 18: mod_base = OTHER; note = Uracil
tcaaggaagatggcatttct

SEQ ID NO: 14741 - DNA, 20 bp, synthetic construct
  misc_feature 1..20: note = Description of Artificial Sequence: Synthetic Antisense oligonucleotide
  misc_feature 1..20: note = Original Sequence: ucaaggaagauggcauuuct
  modified_base 2: mod_base = OTHER; note = bicyclic nucleic acid (BNA)
  modified_base 9: mod_base = OTHER; note = bicyclic nucleic acid (BNA)
  modified_base 19..20: mod_base = OTHER; note = bicyclic nucleic acid (BNA)
  source 1..20: mol_type = other DNA
  modified_base 1: mod_base = OTHER; note = Uracil
  modified_base 11: mod_base = OTHER; note = Uracil
  modified_base 16: mod_base = OTHER; note = Uracil
  modified_base 17: mod_base = OTHER; note = Uracil
  modified_base 18: mod_base = OTHER; note = Uracil
tcaaggaagatggcatttct

SEQ ID NO: 14742 - RNA, 22 nt, synthetic construct
  misc_feature 1..22: note = Description of Artificial Sequence: Synthetic Antisense oligonucleotide
  modified_base 9: mod_base = OTHER; note = bicyclic nucleic acid (BNA)
  modified_base 14: mod_base = OTHER; note = bicyclic nucleic acid (BNA)
  modified_base 21..22: mod_base = OTHER; note = bicyclic nucleic acid (BNA)
  source 1..22: mol_type = other RNA
tcaaggaagatggcatttctag

SEQ ID NO: 14743 - RNA, 22 nt, synthetic construct
  misc_feature 1..22: note = Description of Artificial Sequence: Synthetic Antisense oligonucleotide
  modified_base 5: mod_base = OTHER; note = bicyclic nucleic acid (BNA)
  modified_base 9: mod_base = OTHER; note = bicyclic nucleic acid (BNA)
  modified_base 21..22: mod_base = OTHER; note = bicyclic nucleic acid (BNA)
  source 1..22: mol_type = other RNA
tcaaggaagatggcatttctag

SEQ ID NO: 14744 - RNA, 22 nt, synthetic construct
  misc_feature 1..22: note = Description of Artificial Sequence: Synthetic Antisense oligonucleotide
  modified_base 5: mod_base = OTHER; note = bicyclic nucleic acid (BNA)
  modified_base 19: mod_base = OTHER; note = bicyclic nucleic acid (BNA)
  modified_base 21..22: mod_base = OTHER; note = bicyclic nucleic acid (BNA)
  source 1..22: mol_type = other RNA
tcaaggaagatggcatttctag

SEQ ID NO: 14745 - RNA, 22 nt, synthetic construct
  misc_feature 1..22: note = Description of Artificial Sequence: Synthetic Antisense oligonucleotide
  modified_base 6: mod_base = OTHER; note = bicyclic nucleic acid (BNA)
  modified_base 14: mod_base = OTHER; note = bicyclic nucleic acid (BNA)
  modified_base 21..22: mod_base = OTHER; note = bicyclic nucleic acid (BNA)
  source 1..22: mol_type = other RNA
tcaaggaagatggcatttctag

SEQ ID NO: 14746 - RNA, 22 nt, synthetic construct
  misc_feature 1..22: note = Description of Artificial Sequence: Synthetic Antisense oligonucleotide
  modified_base 5: mod_base = OTHER; note = bicyclic nucleic acid (BNA)
  modified_base 13: mod_base = OTHER; note = bicyclic nucleic acid (BNA)
  modified_base 21..22: mod_base = OTHER; note = bicyclic nucleic acid (BNA)
  source 1..22: mol_type = other RNA
tcaaggaagatggcatttctag

SEQ ID NO: 14747 - RNA, 22 nt, synthetic construct
  misc_feature 1..22: note = Description of Artificial Sequence: Synthetic Antisense oligonucleotide
  modified_base 2: mod_base = OTHER; note = bicyclic nucleic acid (BNA)
  modified_base 12: mod_base = OTHER; note = bicyclic nucleic acid (BNA)
  modified_base 21..22: mod_base = OTHER; note = bicyclic nucleic acid (BNA)
  source 1..22: mol_type = other RNA
tcaaggaagatggcatttctag

SEQ ID NO: 14748 - RNA, 22 nt, synthetic construct
  misc_feature 1..22: note = Description of Artificial Sequence: Synthetic Antisense oligonucleotide
  modified_base 6: mod_base = OTHER; note = bicyclic nucleic acid (BNA)
  modified_base 9: mod_base = OTHER; note = bicyclic nucleic acid (BNA)
  modified_base 21..22: mod_base = OTHER; note = bicyclic nucleic acid (BNA)
  source 1..22: mol_type = other RNA
tcaaggaagatggcatttctag

SEQ ID NO: 14749 - RNA, 22 nt, synthetic construct
  misc_feature 1..22: note = Description of Artificial Sequence: Synthetic Antisense oligonucleotide
  modified_base 13..14: mod_base = OTHER; note = bicyclic nucleic acid (BNA)
  modified_base 21..22: mod_base = OTHER; note = bicyclic nucleic acid (BNA)
  source 1..22: mol_type = other RNA
tcaaggaagatggcatttctag

SEQ ID NO: 14750 - RNA, 22 nt, synthetic construct
  misc_feature 1..22: note = Description of Artificial Sequence: Synthetic Antisense oligonucleotide
  modified_base 6: mod_base = OTHER; note = bicyclic nucleic acid (BNA)
  modified_base 13: mod_base = OTHER; note = bicyclic nucleic acid (BNA)
  modified_base 21..22: mod_base = OTHER; note = bicyclic nucleic acid (BNA)
  source 1..22: mol_type = other RNA
tcaaggaagatggcatttctag

SEQ ID NO: 14751 - RNA, 22 nt, synthetic construct
  misc_feature 1..22: note = Description of Artificial Sequence: Synthetic Antisense oligonucleotide
  modified_base 6: mod_base = OTHER; note = bicyclic nucleic acid (BNA)
  modified_base 19: mod_base = OTHER; note = bicyclic nucleic acid (BNA)
  modified_base 21..22: mod_base = OTHER; note = bicyclic nucleic acid (BNA)
  source 1..22: mol_type = other RNA
tcaaggaagatggcatttctag

SEQ ID NO: 14752 - RNA, 22 nt, synthetic construct
  misc_feature 1..22: note = Description of Artificial Sequence: Synthetic Antisense oligonucleotide
  modified_base 5: mod_base = OTHER; note = bicyclic nucleic acid (BNA)
  modified_base 14: mod_base = OTHER; note = bicyclic nucleic acid (BNA)
  modified_base 21..22: mod_base = OTHER; note = bicyclic nucleic acid (BNA)
  source 1..22: mol_type = other RNA
tcaaggaagatggcatttctag

SEQ ID NO: 14753 - RNA, 22 nt, synthetic construct
  misc_feature 1..22: note = Description of Artificial Sequence: Synthetic Antisense oligonucleotide
  modified_base 2: mod_base = OTHER; note = bicyclic nucleic acid (BNA)
  modified_base 6: mod_base = OTHER; note = bicyclic nucleic acid (BNA)
  modified_base 21..22: mod_base = OTHER; note = bicyclic nucleic acid (BNA)
  source 1..22: mol_type = other RNA
tcaaggaagatggcatttctag

SEQ ID NO: 14754 - RNA, 22 nt, synthetic construct
  misc_feature 1..22: note = Description of Artificial Sequence: Synthetic Antisense oligonucleotide
  modified_base 12: mod_base = OTHER; note = bicyclic nucleic acid (BNA)
  modified_base 19: mod_base = OTHER; note = bicyclic nucleic acid (BNA)
  modified_base 21..22: mod_base = OTHER; note = bicyclic nucleic acid (BNA)
  source 1..22: mol_type = other RNA
tcaaggaagatggcatttctag

SEQ ID NO: 14755 - RNA, 22 nt, synthetic construct
  misc_feature 1..22: note = Description of Artificial Sequence: Synthetic Antisense oligonucleotide
  modified_base 12: mod_base = OTHER; note = bicyclic nucleic acid (BNA)
  modified_base 14: mod_base = OTHER; note = bicyclic nucleic acid (BNA)
  modified_base 21..22: mod_base = OTHER; note = bicyclic nucleic acid (BNA)
  source 1..22: mol_type = other RNA
tcaaggaagatggcatttctag

SEQ ID NO: 14756 - RNA, 22 nt, synthetic construct
  misc_feature 1..22: note = Description of Artificial Sequence: Synthetic Antisense oligonucleotide
  modified_base 6: mod_base = OTHER; note = bicyclic nucleic acid (BNA)
  modified_base 12: mod_base = OTHER; note = bicyclic nucleic acid (BNA)
  modified_base 21..22: mod_base = OTHER; note = bicyclic nucleic acid (BNA)
  source 1..22: mol_type = other RNA
tcaaggaagatggcatttctag

SEQ ID NO: 14757 - RNA, 22 nt, synthetic construct
  misc_feature 1..22: note = Description of Artificial Sequence: Synthetic Antisense oligonucleotide
  modified_base 5..6: mod_base = OTHER; note = bicyclic nucleic acid (BNA)
  modified_base 21..22: mod_base = OTHER; note = bicyclic nucleic acid (BNA)
  source 1..22: mol_type = other RNA
tcaaggaagatggcatttctag

SEQ ID NO: 14758 - RNA, 22 nt, synthetic construct
  misc_feature 1..22: note = Description of Artificial Sequence: Synthetic Antisense oligonucleotide
  modified_base 2: mod_base = OTHER; note = bicyclic nucleic acid (BNA)
  modified_base 14: mod_base = OTHER; note = bicyclic nucleic acid (BNA)
  modified_base 21..22: mod_base = OTHER; note = bicyclic nucleic acid (BNA)
  source 1..22: mol_type = other RNA
tcaaggaagatggcatttctag

SEQ ID NO: 14759 - RNA, 22 nt, synthetic construct
  misc_feature 1..22: note = Description of Artificial Sequence: Synthetic Antisense oligonucleotide
  modified_base 9: mod_base = OTHER; note = bicyclic nucleic acid (BNA)
  modified_base 12: mod_base = OTHER; note = bicyclic nucleic acid (BNA)
  modified_base 21..22: mod_base = OTHER; note = bicyclic nucleic acid (BNA)
  source 1..22: mol_type = other RNA
tcaaggaagatggcatttctag

SEQ ID NO: 14760 - RNA, 22 nt, synthetic construct
  misc_feature 1..22: note = Description of Artificial Sequence: Synthetic Antisense oligonucleotide
  modified_base 2: mod_base = OTHER; note = bicyclic nucleic acid (BNA)
  modified_base 5: mod_base = OTHER; note = bicyclic nucleic acid (BNA)
  modified_base 21..22: mod_base = OTHER; note = bicyclic nucleic acid (BNA)
  source 1..22: mol_type = other RNA
tcaaggaagatggcatttctag

SEQ ID NO: 14761 - RNA, 22 nt, synthetic construct
  misc_feature 1..22: note = Description of Artificial Sequence: Synthetic Antisense oligonucleotide
  modified_base 13: mod_base = OTHER; note = bicyclic nucleic acid (BNA)
  modified_base 19: mod_base = OTHER; note = bicyclic nucleic acid (BNA)
  modified_base 21..22: mod_base = OTHER; note = bicyclic nucleic acid (BNA)
  source 1..22: mol_type = other RNA
tcaaggaagatggcatttctag

SEQ ID NO: 14762 - RNA, 22 nt, synthetic construct
  misc_feature 1..22: note = Description of Artificial Sequence: Synthetic Antisense oligonucleotide
  modified_base 12..13: mod_base = OTHER; note = bicyclic nucleic acid (BNA)
  modified_base 21..22: mod_base = OTHER; note = bicyclic nucleic acid (BNA)
  source 1..22: mol_type = other RNA
tcaaggaagatggcatttctag

SEQ ID NO: 14763 - RNA, 22 nt, synthetic construct
  misc_feature 1..22: note = Description of Artificial Sequence: Synthetic Antisense oligonucleotide
  modified_base 5: mod_base = OTHER; note = bicyclic nucleic acid (BNA)
  modified_base 12: mod_base = OTHER; note = bicyclic nucleic acid (BNA)
  modified_base 21..22: mod_base = OTHER; note = bicyclic nucleic acid (BNA)
  source 1..22: mol_type = other RNA
tcaaggaagatggcatttctag

SEQ ID NO: 14764 - RNA, 22 nt, synthetic construct
  misc_feature 1..22: note = Description of Artificial Sequence: Synthetic Antisense oligonucleotide
  modified_base 2: mod_base = OTHER; note = bicyclic nucleic acid (BNA)
  modified_base 13: mod_base = OTHER; note = bicyclic nucleic acid (BNA)
  modified_base 21..22: mod_base = OTHER; note = bicyclic nucleic acid (BNA)
  source 1..22: mol_type = other RNA
tcaaggaagatggcatttctag

SEQ ID NO: 14765 - RNA, 22 nt, synthetic construct
  misc_feature 1..22: note = Description of Artificial Sequence: Synthetic Antisense oligonucleotide
  modified_base 9: mod_base = OTHER; note = bicyclic nucleic acid (BNA)
  modified_base 13: mod_base = OTHER; note = bicyclic nucleic acid (BNA)
  modified_base 21..22: mod_base = OTHER; note = bicyclic nucleic acid (BNA)
  source 1..22: mol_type = other RNA
tcaaggaagatggcatttctag

SEQ ID NO: 14766 - RNA, 22 nt, synthetic construct
  misc_feature 1..22: note = Description of Artificial Sequence: Synthetic Antisense oligonucleotide
  modified_base 2: mod_base = OTHER; note = bicyclic nucleic acid (BNA)
  modified_base 19: mod_base = OTHER; note = bicyclic nucleic acid (BNA)
  modified_base 21..22: mod_base = OTHER; note = bicyclic nucleic acid (BNA)
  source 1..22: mol_type = other RNA
tcaaggaagatggcatttctag

SEQ ID NO: 14767 - RNA, 22 nt, synthetic construct
  misc_feature 1..22: note = Description of Artificial Sequence: Synthetic Antisense oligonucleotide
  modified_base 2: mod_base = OTHER; note = bicyclic nucleic acid (BNA)
  modified_base 9: mod_base = OTHER; note = bicyclic nucleic acid (BNA)
  modified_base 21..22: mod_base = OTHER; note = bicyclic nucleic acid (BNA)
  source 1..22: mol_type = other RNA
tcaaggaagatggcatttctag

SEQ ID NO: 14768 - RNA, 22 nt, synthetic construct
  misc_feature 1..22: note = Description of Artificial Sequence: Synthetic Antisense oligonucleotide
  modified_base 14: mod_base = OTHER; note = bicyclic nucleic acid (BNA)
  modified_base 19: mod_base = OTHER; note = bicyclic nucleic acid (BNA)
  modified_base 21..22: mod_base = OTHER; note = bicyclic nucleic acid (BNA)
  source 1..22: mol_type = other RNA
tcaaggaagatggcatttctag

SEQ ID NO: 14769 - RNA, 22 nt, synthetic construct
  misc_feature 1..22: note = Description of Artificial Sequence: Synthetic Antisense oligonucleotide
  modified_base 9: mod_base = OTHER; note = bicyclic nucleic acid (BNA)
  modified_base 19: mod_base = OTHER; note = bicyclic nucleic acid (BNA)
  modified_base 21..22: mod_base = OTHER; note = bicyclic nucleic acid (BNA)
  source 1..22: mol_type = other RNA
tcaaggaagatggcatttctag

SEQ ID NO: 14770 - RNA, 18 nt, synthetic construct
  misc_feature 1..18: note = Description of Artificial Sequence: Synthetic Antisense oligonucleotide
  modified_base 2: mod_base = OTHER; note = bicyclic nucleic acid (BNA)
  modified_base 17..18: mod_base = OTHER; note = bicyclic nucleic acid (BNA)
  modified_base 9: mod_base = OTHER; note = 5-methyl
  modified_base 13..14: mod_base = OTHER; note = 5-methyl
  modified_base 18: mod_base = OTHER; note = 5-methyl
  source 1..18: mol_type = other RNA
ggtaagttctgtccaagc

SEQ ID NO: 14771 - RNA, 18 nt, synthetic construct
  misc_feature 1..18: note = Description of Artificial Sequence: Synthetic Antisense oligonucleotide
  modified_base 9: mod_base = OTHER; note = 5-methyl
  modified_base 13..14: mod_base = OTHER; note = 5-methyl
  modified_base 18: mod_base = OTHER; note = 5-methyl
  modified_base 9: mod_base = OTHER; note = bicyclic nucleic acid (BNA)
  modified_base 17..18: mod_base = OTHER; note = bicyclic nucleic acid (BNA)
  source 1..18: mol_type = other RNA
ggtaagttctgtccaagc

SEQ ID NO: 14772 - RNA, 18 nt, synthetic construct
  misc_feature 1..18: note = Description of Artificial Sequence: Synthetic Antisense oligonucleotide
  modified_base 9: mod_base = OTHER; note = 5-methyl
  modified_base 13..14: mod_base = OTHER; note = 5-methyl
  modified_base 18: mod_base = OTHER; note = 5-methyl
  modified_base 11: mod_base = OTHER; note = bicyclic nucleic acid (BNA)
  modified_base 17..18: mod_base = OTHER; note = bicyclic nucleic acid (BNA)
  source 1..18: mol_type = other RNA
ggtaagttctgtccaagc

SEQ ID NO: 14773 - RNA, 18 nt, synthetic construct
  misc_feature 1..18: note = Description of Artificial Sequence: Synthetic Antisense oligonucleotide
  modified_base 6: mod_base = OTHER; note = bicyclic nucleic acid (BNA)
  modified_base 17..18: mod_base = OTHER; note = bicyclic nucleic acid (BNA)
  modified_base 9: mod_base = OTHER; note = 5-methyl
  modified_base 13..14: mod_base = OTHER; note = 5-methyl
  modified_base 18: mod_base = OTHER; note = 5-methyl
  source 1..18: mol_type = other RNA
ggtaagttctgtccaagc

SEQ ID NO: 14774 - RNA, 18 nt, synthetic construct
  misc_feature 1..18: note = Description of Artificial Sequence: Synthetic Antisense oligonucleotide
  modified_base 9: mod_base = OTHER; note = 5-methyl
  modified_base 13..14: mod_base = OTHER; note = 5-methyl
  modified_base 18: mod_base = OTHER; note = 5-methyl
  modified_base 13: mod_base = OTHER; note = bicyclic nucleic acid (BNA)
  modified_base 17..18: mod_base = OTHER; note = bicyclic nucleic acid (BNA)
  source 1..18: mol_type = other RNA
ggtaagttctgtccaagc

SEQ ID NO: 14775 - RNA, 18 nt, synthetic construct
  misc_feature 1..18: note = Description of Artificial Sequence: Synthetic Antisense oligonucleotide
  modified_base 9: mod_base = OTHER; note = 5-methyl
  modified_base 13..14: mod_base = OTHER; note = 5-methyl
  modified_base 18: mod_base = OTHER; note = 5-methyl
  modified_base 14: mod_base = OTHER; note = bicyclic nucleic acid (BNA)
  modified_base 17..18: mod_base = OTHER; note = bicyclic nucleic acid (BNA)
  source 1..18: mol_type = other RNA
ggtaagttctgtccaagc

SEQ ID NO: 14776 - RNA, 18 nt, synthetic construct
  misc_feature 1..18: note = Description of Artificial Sequence: Synthetic Antisense oligonucleotide
  modified_base 8: mod_base = OTHER; note = 5-methyl
  modified_base 12..13: mod_base = OTHER; note = 5-methyl
  modified_base 17..18: mod_base = OTHER; note = 5-methyl
  modified_base 16..18: mod_base = OTHER; note = bicyclic nucleic acid (BNA)
  source 1..18: mol_type = other RNA
gtaagttctgtccaagcc

SEQ ID NO: 14777 - RNA, 18 nt, synthetic construct
  misc_feature 1..18: note = Description of Artificial Sequence: Synthetic Antisense oligonucleotide
  modified_base 8: mod_base = OTHER; note = 5-methyl
  modified_base 12..13: mod_base = OTHER; note = 5-methyl
  modified_base 17..18: mod_base = OTHER; note = 5-methyl
  modified_base 10: mod_base = OTHER; note = bicyclic nucleic acid (BNA)
  modified_base 17..18: mod_base = OTHER; note = bicyclic nucleic acid (BNA)
  source 1..18: mol_type = other RNA
gtaagttctgtccaagcc

SEQ ID NO: 14778 - RNA, 18 nt, synthetic construct
  misc_feature 1..18: note = Description of Artificial Sequence: Synthetic Antisense oligonucleotide
  modified_base 5: mod_base = OTHER; note = bicyclic nucleic acid (BNA)
  modified_base 17..18: mod_base = OTHER; note = bicyclic nucleic acid (BNA)
  modified_base 8: mod_base = OTHER; note = 5-methyl
  modified_base 12..13: mod_base = OTHER; note = 5-methyl
  modified_base 17..18: mod_base = OTHER; note = 5-methyl
  source 1..18: mol_type = other RNA
gtaagttctgtccaagcc

SEQ ID NO: 14779 - RNA, 18 nt, synthetic construct
  misc_feature 1..18: note = Description of Artificial Sequence: Synthetic Antisense oligonucleotide
  modified_base 8: mod_base = OTHER; note = 5-methyl
  modified_base 12..13: mod_base = OTHER; note = 5-methyl
  modified_base 17..18: mod_base = OTHER; note = 5-methyl
  modified_base 12: mod_base = OTHER; note = bicyclic nucleic acid (BNA)
  modified_base 17..18: mod_base = OTHER; note = bicyclic nucleic acid (BNA)
  source 1..18: mol_type = other RNA
gtaagttctgtccaagcc

SEQ ID NO: 14780 - RNA, 18 nt, synthetic construct
  misc_feature 1..18: note = Description of Artificial Sequence: Synthetic Antisense oligonucleotide
  modified_base 8: mod_base = OTHER; note = 5-methyl
  modified_base 12..13: mod_base = OTHER; note = 5-methyl
  modified_base 17..18: mod_base = OTHER; note = 5-methyl
  modified_base 13: mod_base = OTHER; note = bicyclic nucleic acid (BNA)
  modified_base 17..18: mod_base = OTHER; note = bicyclic nucleic acid (BNA)
  source 1..18: mol_type = other RNA
gtaagttctgtccaagcc

SEQ ID NO: 14781 - RNA, 18 nt, synthetic construct
  misc_feature 1..18: note = Description of Artificial Sequence: Synthetic Antisense oligonucleotide
  modified_base 8: mod_base = OTHER; note = 5-methyl
  modified_base 12..13: mod_base = OTHER; note = 5-methyl
  modified_base 17..18: mod_base = OTHER; note = 5-methyl
  modified_base 8: mod_base = OTHER; note = bicyclic nucleic acid (BNA)
  modified_base 17..18: mod_base = OTHER; note = bicyclic nucleic acid (BNA)
  source 1..18: mol_type = other RNA
gtaagttctgtccaagcc

SEQ ID NO: 14782 - RNA, 18 nt, synthetic construct
  misc_feature 1..18: note = Description of Artificial Sequence: Synthetic Antisense oligonucleotide
  modified_base 2: mod_base = OTHER; note = bicyclic nucleic acid (BNA)
  modified_base 17..18: mod_base = OTHER; note = bicyclic nucleic acid (BNA)
  modified_base 4: mod_base = OTHER; note = 5-methyl
  modified_base 13: mod_base = OTHER; note = 5-methyl
  modified_base 17..18: mod_base = OTHER; note = 5-methyl
  source 1..18: mol_type = other RNA
agtcggtaagttctgtcc

SEQ ID NO: 14783 - RNA, 18 nt, synthetic construct
  misc_feature 1..18: note = Description of Artificial Sequence: Synthetic Antisense oligonucleotide
  modified_base 4: mod_base = OTHER; note = 5-methyl
  modified_base 13: mod_base = OTHER; note = 5-methyl
  modified_base 17..18: mod_base = OTHER; note = 5-methyl
  modified_base 4: mod_base = OTHER; note = bicyclic nucleic acid (BNA)
  modified_base 17..18: mod_base = OTHER; note = bicyclic nucleic acid (BNA)
  source 1..18: mol_type = other RNA
agtcggtaagttctgtcc

SEQ ID NO: 14784 - RNA, 18 nt, synthetic construct
  misc_feature 1..18: note = Description of Artificial Sequence: Synthetic Antisense oligonucleotide
  modified_base 4: mod_base = OTHER; note = 5-methyl
  modified_base 13: mod_base = OTHER; note = 5-methyl
  modified_base 17..18: mod_base = OTHER; note = 5-methyl
  modified_base 10: mod_base = OTHER; note = bicyclic nucleic acid (BNA)
  modified_base 17..18: mod_base = OTHER; note = bicyclic nucleic acid (BNA)
  source 1..18: mol_type = other RNA
agtcggtaagttctgtcc

SEQ ID NO: 14785 - RNA, 18 nt, synthetic construct
  misc_feature 1..18: note = Description of Artificial Sequence: Synthetic Antisense oligonucleotide
  modified_base 4: mod_base = OTHER; note = 5-methyl
  modified_base 13: mod_base = OTHER; note = 5-methyl
  modified_base 17..18: mod_base = OTHER; note = 5-methyl
  modified_base 5: mod_base = OTHER; note = bicyclic nucleic acid (BNA)
  modified_base 17..18: mod_base = OTHER; note = bicyclic nucleic acid (BNA)
  source 1..18: mol_type = other RNA
agtcggtaagttctgtcc

SEQ ID NO: 14786 - RNA, 18 nt, synthetic construct
  misc_feature 1..18: note = Description of Artificial Sequence: Synthetic Antisense oligonucleotide
  modified_base 4: mod_base = OTHER; note = 5-methyl
  modified_base 13: mod_base = OTHER; note = 5-methyl
  modified_base 17..18: mod_base = OTHER; note = 5-methyl
  modified_base 6: mod_base = OTHER; note = bicyclic nucleic acid (BNA)
  modified_base 17..18: mod_base = OTHER; note = bicyclic nucleic acid (BNA)
  source 1..18: mol_type = other RNA
agtcggtaagttctgtcc

SEQ ID NO: 14787 - RNA, 18 nt, synthetic construct
  misc_feature 1..18: note = Description of Artificial Sequence: Synthetic Antisense oligonucleotide
  modified_base 4: mod_base = OTHER; note = 5-methyl
  modified_base 13: mod_base = OTHER; note = 5-methyl
  modified_base 17..18: mod_base = OTHER; note = 5-methyl
  modified_base 13: mod_base = OTHER; note = bicyclic nucleic acid (BNA)
  modified_base 17..18: mod_base = OTHER; note = bicyclic nucleic acid (BNA)
  source 1..18: mol_type = other RNA
agtcggtaagttctgtcc

SEQ ID NO: 14788 - RNA, 18 nt, synthetic construct
  misc_feature 1..18: note = Description of Artificial Sequence: Synthetic Antisense oligonucleotide
  modified_base 4: mod_base = OTHER; note = 5-methyl
  modified_base 13: mod_base = OTHER; note = 5-methyl
  modified_base 17..18: mod_base = OTHER; note = 5-methyl
  modified_base 15: mod_base = OTHER; note = bicyclic nucleic acid (BNA)
  modified_base 17..18: mod_base = OTHER; note = bicyclic nucleic acid (BNA)
  source 1..18: mol_type = other RNA
agtcggtaagttctgtcc

SEQ ID NO: 14789 - RNA, 18 nt, synthetic construct
  misc_feature 1..18: note = Description of Artificial Sequence: Synthetic Antisense oligonucleotide
  modified_base 1: mod_base = OTHER; note = 5-methyl
  modified_base 5..6: mod_base = OTHER; note = 5-methyl
  modified_base 10..12: mod_base = OTHER; note = 5-methyl
  modified_base 3: mod_base = OTHER; note = bicyclic nucleic acid (BNA)
  modified_base 17..18: mod_base = OTHER; note = bicyclic nucleic acid (BNA)
  source 1..18: mol_type = other RNA
ctgtccaagcccggttga

SEQ ID NO: 14790 - RNA, 18 nt, synthetic construct
  misc_feature 1..18: note = Description of Artificial Sequence: Synthetic Antisense oligonucleotide
  modified_base 1: mod_base = OTHER; note = 5-methyl
  modified_base 5..6: mod_base = OTHER; note = 5-methyl
  modified_base 10..12: mod_base = OTHER; note = 5-methyl
  modified_base 9: mod_base = OTHER; note = bicyclic nucleic acid (BNA)
  modified_base 17..18: mod_base = OTHER; note = bicyclic nucleic acid (BNA)
  source 1..18: mol_type = other RNA
ctgtccaagcccggttga

SEQ ID NO: 14791 - RNA, 18 nt, synthetic construct
  misc_feature 1..18: note = Description of Artificial Sequence: Synthetic Antisense oligonucleotide
  modified_base 1: mod_base = OTHER; note = 5-methyl
  modified_base 5..6: mod_base = OTHER; note = 5-methyl
  modified_base 10..12: mod_base = OTHER; note = 5-methyl
  modified_base 10: mod_base = OTHER; note = bicyclic nucleic acid (BNA)
  modified_base 17..18: mod_base = OTHER; note = bicyclic nucleic acid (BNA)
  source 1..18: mol_type = other RNA
ctgtccaagcccggttga

SEQ ID NO: 14792 - RNA, 18 nt, synthetic construct
  misc_feature 1..18: note = Description of Artificial Sequence: Synthetic Antisense oligonucleotide
  modified_base 1: mod_base = OTHER; note = 5-methyl
  modified_base 5..6: mod_base = OTHER; note = 5-methyl
  modified_base 10..12: mod_base = OTHER; note = 5-methyl
  modified_base 5: mod_base = OTHER; note = bicyclic nucleic acid (BNA)
  modified_base 17..18: mod_base = OTHER; note = bicyclic nucleic acid (BNA)
  source 1..18: mol_type = other RNA
ctgtccaagcccggttga

SEQ ID NO: 14793 - RNA, 18 nt, synthetic construct
  misc_feature 1..18: note = Description of Artificial Sequence: Synthetic Antisense oligonucleotide
  modified_base 1: mod_base = OTHER; note = 5-methyl
  modified_base 5..6: mod_base = OTHER; note = 5-methyl
  modified_base 10..12: mod_base = OTHER; note = 5-methyl
  modified_base 11: mod_base = OTHER; note = bicyclic nucleic acid (BNA)
  modified_base 17..18: mod_base = OTHER; note = bicyclic nucleic acid (BNA)
  source 1..18: mol_type = other RNA
ctgtccaagcccggttga

SEQ ID NO: 14794 - RNA, 18 nt, synthetic construct
  misc_feature 1..18: note = Description of Artificial Sequence: Synthetic Antisense oligonucleotide
  modified_base 1: mod_base = OTHER; note = 5-methyl
  modified_base 5..6: mod_base = OTHER; note = 5-methyl
  modified_base 10..12: mod_base = OTHER; note = 5-methyl
  modified_base 6: mod_base = OTHER; note = bicyclic nucleic acid (BNA)
  modified_base 17..18: mod_base = OTHER; note = bicyclic nucleic acid (BNA)
  source 1..18: mol_type = other RNA
ctgtccaagcccggttga

SEQ ID NO: 14795 - RNA, 18 nt, synthetic construct
  misc_feature 1..18: note = Description of Artificial Sequence: Synthetic Antisense oligonucleotide
  modified_base 1: mod_base = OTHER; note = 5-methyl
  modified_base 5..6: mod_base = OTHER; note = 5-methyl
  modified_base 10..12: mod_base = OTHER; note = 5-methyl
  modified_base 12: mod_base = OTHER; note = bicyclic nucleic acid (BNA)
  modified_base 17..18: mod_base = OTHER; note = bicyclic nucleic acid (BNA)
  source 1..18: mol_type = other RNA
ctgtccaagcccggttga

SEQ ID NO: 14796 - RNA, 18 nt, synthetic construct
  misc_feature 1..18: note = Description of Artificial Sequence: Synthetic Antisense oligonucleotide
  modified_base 1: mod_base = OTHER; note = 5-methyl
  modified_base 5..6: mod_base = OTHER; note = 5-methyl
  modified_base 10..12: mod_base = OTHER; note = 5-methyl
  modified_base 13: mod_base = OTHER; note = bicyclic nucleic acid (BNA)
  modified_base 17..18: mod_base = OTHER; note = bicyclic nucleic acid (BNA)
  source 1..18: mol_type = other RNA
ctgtccaagcccggttga

SEQ ID NO: 14797 - RNA, 18 nt, synthetic construct
  misc_feature 1..18: note = Description of Artificial Sequence: Synthetic Antisense oligonucleotide
  modified_base 1: mod_base = OTHER; note = 5-methyl
  modified_base 5..6: mod_base = OTHER; note = 5-methyl
  modified_base 10..12: mod_base = OTHER; note = 5-methyl
  modified_base 14: mod_base = OTHER; note = bicyclic nucleic acid (BNA)
  modified_base 17..18: mod_base = OTHER; note = bicyclic nucleic acid (BNA)
  source 1..18: mol_type = other RNA
ctgtccaagcccggttga

SEQ ID NO: 14798 - RNA, 18 nt, synthetic construct
  misc_feature 1..18: note = Description of Artificial Sequence: Synthetic Antisense oligonucleotide
  modified_base 6: mod_base = OTHER; note = bicyclic nucleic acid (BNA)
  modified_base 11: mod_base = OTHER; note = bicyclic nucleic acid (BNA)
  modified_base 17..18: mod_base = OTHER; note = bicyclic nucleic acid (BNA)
  modified_base 9: mod_base = OTHER; note = 5-methyl
  modified_base 13..14: mod_base = OTHER; note = 5-methyl
  modified_base 18: mod_base = OTHER; note = 5-methyl
  source 1..18: mol_type = other RNA
ggtaagttctgtccaagc

SEQ ID NO: 14799 - RNA, 18 nt, synthetic construct
  misc_feature 1..18: note = Description of Artificial Sequence: Synthetic Antisense oligonucleotide
  modified_base 9: mod_base = OTHER; note = 5-methyl
  modified_base 13..14: mod_base = OTHER; note = 5-methyl
  modified_base 18: mod_base = OTHER; note = 5-methyl
  modified_base 9: mod_base = OTHER; note = bicyclic nucleic acid (BNA)
  modified_base 14: mod_base = OTHER; note = bicyclic nucleic acid (BNA)
  modified_base 17..18: mod_base = OTHER; note = bicyclic nucleic acid (BNA)
  source 1..18: mol_type = other RNA
ggtaagttctgtccaagc

SEQ ID NO: 14800 - RNA, 18 nt, synthetic construct
  misc_feature 1..18: note = Description of Artificial Sequence: Synthetic Antisense oligonucleotide
  modified_base 2: mod_base = OTHER; note = bicyclic nucleic acid (BNA)
  modified_base 13: mod_base = OTHER; note = bicyclic nucleic acid (BNA)
  modified_base 17..18: mod_base = OTHER; note = bicyclic nucleic acid (BNA)
  modified_base 9: mod_base = OTHER; note = 5-methyl
  modified_base 13..14: mod_base = OTHER; note = 5-methyl
  modified_base 18: mod_base = OTHER; note = 5-methyl
  source 1..18: mol_type = other RNA
ggtaagttctgtccaagc

SEQ ID NO: 14801 - RNA, 18 nt, synthetic construct
  misc_feature 1..18: note = Description of Artificial Sequence: Synthetic Antisense oligonucleotide
  modified_base 9: mod_base = OTHER; note = 5-methyl
  modified_base 13..14: mod_base = OTHER; note = 5-methyl
  modified_base 18: mod_base = OTHER; note = 5-methyl
  modified_base 9: mod_base = OTHER; note = bicyclic nucleic acid (BNA)
  modified_base 13: mod_base = OTHER; note = bicyclic nucleic acid (BNA)
  modified_base 17..18: mod_base = OTHER; note = bicyclic nucleic acid (BNA)
  source 1..18: mol_type = other RNA
ggtaagttctgtccaagc

SEQ ID NO: 14802 - RNA, 18 nt, synthetic construct
  misc_feature 1..18: note = Description of Artificial Sequence: Synthetic Antisense oligonucleotide
  modified_base 9: mod_base = OTHER; note = 5-methyl
  modified_base 13..14: mod_base = OTHER; note = 5-methyl
  modified_base 18: mod_base = OTHER; note = 5-methyl
  modified_base 13..14: mod_base = OTHER; note = bicyclic nucleic acid (BNA)
  modified_base 17..18: mod_base = OTHER; note = bicyclic nucleic acid (BNA)
  source 1..18: mol_type = other RNA
ggtaagttctgtccaagc

SEQ ID NO: 14803 - RNA, 18 nt, synthetic construct
  misc_feature 1..18: note = Description of Artificial Sequence: Synthetic Antisense oligonucleotide
  modified_base 2: mod_base = OTHER; note = bicyclic nucleic acid (BNA)
  modified_base 14: mod_base = OTHER; note = bicyclic nucleic acid (BNA)
  modified_base 17..18: mod_base = OTHER; note = bicyclic nucleic acid (BNA)
  modified_base 9: mod_base = OTHER; note = 5-methyl
  modified_base 13..14: mod_base = OTHER; note = 5-methyl
  modified_base 18: mod_base = OTHER; note = 5-methyl
  source 1..18: mol_type = other RNA
ggtaagttctgtccaagc

SEQ ID NO: 14804 - RNA, 18 nt, synthetic construct
  misc_feature 1..18: note = Description of Artificial Sequence: Synthetic Antisense oligonucleotide
  modified_base 9: mod_base = OTHER; note = 5-methyl
  modified_base 13..14: mod_base = OTHER; note = 5-methyl
  modified_base 18: mod_base = OTHER; note = 5-methyl
  modified_base 11: mod_base = OTHER; note = bicyclic nucleic acid (BNA)
  modified_base 14: mod_base = OTHER; note = bicyclic nucleic acid (BNA)
  modified_base 17..18: mod_base = OTHER; note = bicyclic nucleic acid (BNA)
  source 1..18: mol_type = other RNA
ggtaagttctgtccaagc

SEQ ID NO: 14805 - RNA, 18 nt, synthetic construct
  misc_feature 1..18: note = Description of Artificial Sequence: Synthetic Antisense oligonucleotide
  modified_base 6: mod_base = OTHER; note = bicyclic nucleic acid (BNA)
  modified_base 13: mod_base = OTHER; note = bicyclic nucleic acid (BNA)
  modified_base 17..18: mod_base = OTHER; note = bicyclic nucleic acid (BNA)
  modified_base 9: mod_base = OTHER; note = 5-methyl
  modified_base 13..14: mod_base = OTHER; note = 5-methyl
  modified_base 18: mod_base = OTHER; note = 5-methyl
  source 1..18: mol_type = other RNA
ggtaagttctgtccaagc

SEQ ID NO: 14806 - RNA, 18 nt, synthetic construct
  misc_feature 1..18: note = Description of Artificial Sequence: Synthetic Antisense oligonucleotide
  modified_base 6: mod_base = OTHER; note = bicyclic nucleic acid (BNA)
  modified_base 14: mod_base = OTHER; note = bicyclic nucleic acid (BNA)
  modified_base 17..18: mod_base = OTHER; note = bicyclic nucleic acid (BNA)
  modified_base 9: mod_base = OTHER; note = 5-methyl
  modified_base 13..14: mod_base = OTHER; note = 5-methyl
  modified_base 18: mod_base = OTHER; note = 5-methyl
  source 1..18: mol_type = other RNA
ggtaagttctgtccaagc

SEQ ID NO: 14807 - RNA, 18 nt, synthetic construct
  misc_feature 1..18: note = Description of Artificial Sequence: Synthetic Antisense oligonucleotide
  modified_base 9: mod_base = OTHER; note = 5-methyl
  modified_base 13..14: mod_base = OTHER; note = 5-methyl
  modified_base 18: mod_base = OTHER; note = 5-methyl
  modified_base 9: mod_base = OTHER; note = bicyclic nucleic acid (BNA)
  modified_base 11: mod_base = OTHER; note = bicyclic nucleic acid (BNA)
  modified_base 17..18: mod_base = OTHER; note = bicyclic nucleic acid (BNA)
  source 1..18: mol_type = other RNA
ggtaagttctgtccaagc

SEQ ID NO: 14808 - RNA, 18 nt, synthetic construct
  misc_feature 1..18: note = Description of Artificial Sequence: Synthetic Antisense oligonucleotide
  modified_base 9: mod_base = OTHER; note = 5-methyl
  modified_base 13..14: mod_base = OTHER; note = 5-methyl
  modified_base 18: mod_base = OTHER; note = 5-methyl
  modified_base 11: mod_base = OTHER; note = bicyclic nucleic acid (BNA)
  modified_base 13: mod_base = OTHER; note = bicyclic nucleic acid (BNA)
  modified_base 17..18: mod_base = OTHER; note = bicyclic nucleic acid (BNA)
  source 1..18: mol_type = other RNA
ggtaagttctgtccaagc

SEQ ID NO: 14809 - RNA, 18 nt, synthetic construct
  misc_feature 1..18: note = Description of Artificial Sequence: Synthetic Antisense oligonucleotide
  modified_base 2: mod_base = OTHER; note = bicyclic nucleic acid (BNA)
  modified_base 6: mod_base = OTHER; note = bicyclic nucleic acid (BNA)
  modified_base 17..18: mod_base = OTHER; note = bicyclic nucleic acid (BNA)
  modified_base 9: mod_base = OTHER; note = 5-methyl
  modified_base 13..14: mod_base = OTHER; note = 5-methyl
  modified_base 18: mod_base = OTHER; note = 5-methyl
  source 1..18: mol_type = other RNA
ggtaagttctgtccaagc

SEQ ID NO: 14810 - RNA, 18 nt, synthetic construct
  misc_feature 1..18: note = Description of Artificial Sequence: Synthetic Antisense oligonucleotide
  modified_base 2: mod_base = OTHER; note = bicyclic nucleic acid (BNA)
  modified_base 9: mod_base = OTHER; note = bicyclic nucleic acid (BNA)
  modified_base 17..18: mod_base = OTHER; note = bicyclic nucleic acid (BNA)
  modified_base 9: mod_base = OTHER; note = 5-methyl
  modified_base 13..14: mod_base = OTHER; note = 5-methyl
  modified_base 18: mod_base = OTHER; note = 5-methyl
  source 1..18: mol_type = other RNA
ggtaagttctgtccaagc

SEQ ID NO: 14811 - RNA, 18 nt, synthetic construct
  misc_feature 1..18: note = Description of Artificial Sequence: Synthetic Antisense oligonucleotide
  modified_base 2: mod_base = OTHER; note = bicyclic nucleic acid (BNA)
  modified_base 11: mod_base = OTHER; note = bicyclic nucleic acid (BNA)
  modified_base 17..18: mod_base = OTHER; note = bicyclic nucleic acid (BNA)
  modified_base 9: mod_base = OTHER; note = 5-methyl
  modified_base 13..14: mod_base = OTHER; note = 5-methyl
  modified_base 18: mod_base = OTHER; note = 5-methyl
  source 1..18: mol_type = other RNA
ggtaagttctgtccaagc

SEQ ID NO: 14812 - RNA, 18 nt, synthetic construct
  misc_feature 1..18: note = Description of Artificial Sequence: Synthetic Antisense oligonucleotide
  modified_base 6: mod_base = OTHER; note = bicyclic nucleic acid (BNA)
  modified_base 9: mod_base = OTHER; note = bicyclic nucleic acid (BNA)
  modified_base 17..18: mod_base = OTHER; note = bicyclic nucleic acid (BNA)
  modified_base 9: mod_base = OTHER; note = 5-methyl
  modified_base 13..14: mod_base = OTHER; note = 5-methyl
  modified_base 18: mod_base = OTHER; note = 5-methyl
  source 1..18: mol_type = other RNA
ggtaagttctgtccaagc

SEQ ID NO: 14813 - RNA, 18 nt, synthetic construct
  misc_feature 1..18: note = Description of Artificial Sequence: Synthetic Antisense oligonucleotide
  modified_base 5: mod_base = OTHER; note = bicyclic nucleic acid (BNA)
  modified_base 8: mod_base = OTHER; note = bicyclic nucleic acid (BNA)
  modified_base 17..18: mod_base = OTHER; note = bicyclic nucleic acid (BNA)
  modified_base 8: mod_base = OTHER; note = 5-methyl
  modified_base 12..13: mod_base = OTHER; note = 5-methyl
  modified_base 17..18: mod_base = OTHER; note = 5-methyl
  source 1..18: mol_type = other RNA
gtaagttctgtccaagcc

SEQ ID NO: 14814 - RNA, 18 nt, synthetic construct
  misc_feature 1..18: note = Description of Artificial Sequence: Synthetic Antisense oligonucleotide
  modified_base 8: mod_base = OTHER; note = 5-methyl
  modified_base 12..13: mod_base = OTHER; note = 5-methyl
  modified_base 17..18: mod_base = OTHER; note = 5-methyl
  modified_base 13: mod_base = OTHER; note = bicyclic nucleic acid (BNA)
  modified_base 16..18: mod_base = OTHER; note = bicyclic nucleic acid (BNA)
  source 1..18: mol_type = other RNA
gtaagttctgtccaagcc

SEQ ID NO: 14815 - RNA, 18 nt, synthetic construct
  misc_feature 1..18: note = Description of Artificial Sequence: Synthetic Antisense oligonucleotide
  modified_base 5: mod_base = OTHER; note = bicyclic nucleic acid (BNA)
  modified_base 10: mod_base = OTHER; note = bicyclic nucleic acid (BNA)
  modified_base 17..18: mod_base = OTHER; note = bicyclic nucleic acid (BNA)
  modified_base 8: mod_base = OTHER; note = 5-methyl
  modified_base 12..13: mod_base = OTHER; note = 5-methyl
  modified_base 17..18: mod_base = OTHER; note = 5-methyl
  source 1..18: mol_type = other RNA
gtaagttctgtccaagcc

SEQ ID NO: 14816 - RNA, 18 nt, synthetic construct
  misc_feature 1..18: note = Description of Artificial Sequence: Synthetic Antisense oligonucleotide
  modified_base 8: mod_base = OTHER; note = 5-methyl
  modified_base 12..13: mod_base = OTHER; note = 5-methyl
  modified_base 17..18: mod_base = OTHER; note = 5-methyl
  modified_base 8: mod_base = OTHER; note = bicyclic nucleic acid (BNA)
  modified_base 16..18: mod_base = OTHER; note = bicyclic nucleic acid (BNA)
  source 1..18: mol_type = other RNA
gtaagttctgtccaagcc

SEQ ID NO: 14817 - RNA, 18 nt, synthetic construct
  misc_feature 1..18: note = Description of Artificial Sequence: Synthetic Antisense oligonucleotide
  modified_base 8: mod_base = OTHER; note = 5-methyl
  modified_base 12..13: mod_base = OTHER; note = 5-methyl
  modified_base 17..18: mod_base = OTHER; note = 5-methyl
  modified_base 10: mod_base = OTHER; note = bicyclic nucleic acid (BNA)
  modified_base 16..18: mod_base = OTHER; note = bicyclic nucleic acid (BNA)
  source 1..18: mol_type = other RNA
gtaagttctgtccaagcc

SEQ ID NO: 14818 - RNA, 18 nt, synthetic construct
  misc_feature 1..18: note = Description of Artificial Sequence: Synthetic Antisense oligonucleotide
  modified_base 8: mod_base = OTHER; note = 5-methyl
  modified_base 12..13: mod_base = OTHER; note = 5-methyl
  modified_base 17..18: mod_base = OTHER; note = 5-methyl
  modified_base 8: mod_base = OTHER; note = bicyclic nucleic acid (BNA)
  modified_base 13: mod_base = OTHER; note = bicyclic nucleic acid (BNA)
  modified_base 17..18: mod_base = OTHER; note = bicyclic nucleic acid (BNA)
  source 1..18: mol_type = other RNA
gtaagttctgtccaagcc

SEQ ID NO: 14819 - RNA, 18 nt, synthetic construct
  misc_feature 1..18: note = Description of Artificial Sequence: Synthetic Antisense oligonucleotide
  modified_base 5: mod_base = OTHER; note = bicyclic nucleic acid (BNA)
  modified_base 16..18: mod_base = OTHER; note = bicyclic nucleic acid (BNA)
  modified_base 8: mod_base = OTHER; note = 5-methyl
  modified_base 12..13: mod_base = OTHER; note = 5-methyl
  modified_base 17..18: mod_base = OTHER; note = 5-methyl
  source 1..18: mol_type = other RNA
gtaagttctgtccaagcc

SEQ ID NO: 14820 - RNA, 18 nt, synthetic construct
  misc_feature 1..18: note = Description of Artificial Sequence: Synthetic Antisense oligonucleotide
  modified_base 8: mod_base = OTHER; note = 5-methyl
  modified_base 12..13: mod_base = OTHER; note = 5-methyl
  modified_base 17..18: mod_base = OTHER; note = 5-methyl
  modified_base 10: mod_base = OTHER; note = bicyclic nucleic acid (BNA)
  modified_base 13: mod_base = OTHER; note = bicyclic nucleic acid (BNA)
  modified_base 17..18: mod_base = OTHER; note = bicyclic nucleic acid (BNA)
  source 1..18: mol_type = other RNA
gtaagttctgtccaagcc

SEQ ID NO: 14821 - RNA, 18 nt, synthetic construct
  misc_feature 1..18: note = Description of Artificial Sequence: Synthetic Antisense oligonucleotide
  modified_base 5: mod_base = OTHER; note = bicyclic nucleic acid (BNA)
  modified_base 13: mod_base = OTHER; note = bicyclic nucleic acid (BNA)
  modified_base 17..18: mod_base = OTHER; note = bicyclic nucleic acid (BNA)
  modified_base 8: mod_base = OTHER; note = 5-methyl
  modified_base 12..13: mod_base = OTHER; note = 5-methyl
  modified_base 17..18: mod_base = OTHER; note = 5-methyl
  source 1..18: mol_type = other RNA
gtaagttctgtccaagcc

SEQ ID NO: 14822 - RNA, 18 nt, synthetic construct
  misc_feature 1..18: note = Description of Artificial Sequence: Synthetic Antisense oligonucleotide
  modified_base 8: mod_base = OTHER; note = 5-methyl
  modified_base 12..13: mod_base = OTHER; note = 5-methyl
  modified_base 17..18: mod_base = OTHER; note = 5-methyl
  modified_base 10: mod_base = OTHER; note = bicyclic nucleic acid (BNA)
  modified_base 12: mod_base = OTHER; note = bicyclic nucleic acid (BNA)
  modified_base 17..18: mod_base = OTHER; note = bicyclic nucleic acid (BNA)
  source 1..18: mol_type = other RNA
gtaagttctgtccaagcc

SEQ ID NO: 14823 - RNA, 18 nt, synthetic construct
  misc_feature 1..18: note = Description of Artificial Sequence: Synthetic Antisense oligonucleotide
  modified_base 8: mod_base = OTHER; note = 5-methyl
  modified_base 12..13: mod_base = OTHER; note = 5-methyl
  modified_base 17..18: mod_base = OTHER; note = 5-methyl
  modified_base 8: mod_base = OTHER; note = bicyclic nucleic acid (BNA)
  modified_base 12: mod_base = OTHER; note = bicyclic nucleic acid (BNA)
  modified_base 17..18: mod_base = OTHER; note = bicyclic nucleic acid (BNA)
  source 1..18: mol_type = other RNA
gtaagttctgtccaagcc

SEQ ID NO: 14824 - RNA, 18 nt, synthetic construct
  misc_feature 1..18: note = Description of Artificial Sequence: Synthetic Antisense oligonucleotide
  modified_base 8: mod_base = OTHER; note = 5-methyl
  modified_base 12..13: mod_base = OTHER; note = 5-methyl
  modified_base 17..18: mod_base = OTHER; note = 5-methyl
  modified_base 12: mod_base = OTHER; note = bicyclic nucleic acid (BNA)
  modified_base 16..18: mod_base = OTHER; note = bicyclic nucleic acid (BNA)
  source 1..18: mol_type = other RNA
gtaagttctgtccaagcc

SEQ ID NO: 14825 - RNA, 18 nt, synthetic construct
  misc_feature 1..18: note = Description of Artificial Sequence: Synthetic Antisense oligonucleotide
  modified_base 8: mod_base = OTHER; note = 5-methyl
  modified_base 12..13: mod_base = OTHER; note = 5-methyl
  modified_base 17..18: mod_base = OTHER; note = 5-methyl
  modified_base 12..13: mod_base = OTHER; note = bicyclic nucleic acid (BNA)
  modified_base 17..18: mod_base = OTHER; note = bicyclic nucleic acid (BNA)
  source 1..18: mol_type = other RNA
gtaagttctgtccaagcc

SEQ ID NO: 14826 - RNA, 18 nt, synthetic construct
  misc_feature 1..18: note = Description of Artificial Sequence: Synthetic Antisense oligonucleotide
  modified_base 5: mod_base = OTHER; note = bicyclic nucleic acid (BNA)
  modified_base 12: mod_base = OTHER; note = bicyclic nucleic acid (BNA)
  modified_base 17..18: mod_base = OTHER; note = bicyclic nucleic acid (BNA)
  modified_base 8: mod_base = OTHER; note = 5-methyl
  modified_base 12..13: mod_base = OTHER; note = 5-methyl
  modified_base 17..18: mod_base = OTHER; note = 5-methyl
  source 1..18: mol_type = other RNA
gtaagttctgtccaagcc

SEQ ID NO: 14827 - RNA, 18 nt, synthetic construct
  misc_feature 1..18: note = Description of Artificial Sequence: Synthetic Antisense oligonucleotide
  modified_base 8: mod_base = OTHER; note = 5-methyl
  modified_base 12..13: mod_base = OTHER; note = 5-methyl
  modified_base 17..18: mod_base = OTHER; note = 5-methyl
  modified_base 8: mod_base = OTHER; note = bicyclic nucleic acid (BNA)
  modified_base 10: mod_base = OTHER; note = bicyclic nucleic acid (BNA)
  modified_base 17..18: mod_base = OTHER; note = bicyclic nucleic acid (BNA)
  source 1..18: mol_type = other RNA
gtaagttctgtccaagcc

SEQ ID NO: 14828 - RNA, 18 nt, synthetic construct
  misc_feature 1..18: note = Description of Artificial Sequence: Synthetic Antisense oligonucleotide
  modified_base 4: mod_base = OTHER; note = 5-methyl
  modified_base 13: mod_base = OTHER; note = 5-methyl
  modified_base 17..18: mod_base = OTHER; note = 5-methyl
  modified_base 6: mod_base = OTHER; note = bicyclic nucleic acid (BNA)
  modified_base 10: mod_base = OTHER; note = bicyclic nucleic acid (BNA)
  modified_base 17..18: mod_base = OTHER; note = bicyclic nucleic acid (BNA)
  source 1..18: mol_type = other RNA
agtcggtaagttctgtcc

SEQ ID NO: 14829 - RNA, 18 nt, synthetic construct
  misc_feature 1..18: note = Description of Artificial Sequence: Synthetic Antisense oligonucleotide
  modified_base 2: mod_base = OTHER; note = bicyclic nucleic acid (BNA)
  modified_base 4: mod_base = OTHER; note = bicyclic nucleic acid (BNA)
  modified_base 17..18: mod_base = OTHER; note = bicyclic nucleic acid (BNA)
  modified_base 4: mod_base = OTHER; note = 5-methyl
  modified_base 13: mod_base = OTHER; note = 5-methyl
  modified_base 17..18: mod_base = OTHER; note = 5-methyl
  source 1..18: mol_type = other RNA
agtcggtaagttctgtcc

SEQ ID NO: 14830 - RNA, 18 nt, synthetic construct
  misc_feature 1..18: note = Description of Artificial Sequence: Synthetic Antisense oligonucleotide
  modified_base 4: mod_base = OTHER; note = 5-methyl
  modified_base 13: mod_base = OTHER; note = 5-methyl
  modified_base 17..18: mod_base = OTHER; note = 5-methyl
  modified_base 5: mod_base = OTHER; note = bicyclic nucleic acid (BNA)
  modified_base 13: mod_base = OTHER; note = bicyclic nucleic acid (BNA)
  modified_base 17..18: mod_base = OTHER; note = bicyclic nucleic acid (BNA)
  source 1..18: mol_type = other RNA
agtcggtaagttctgtcc

SEQ ID NO: 14831 - RNA, 18 nt, synthetic construct
  misc_feature 1..18: note = Description of Artificial Sequence: Synthetic Antisense oligonucleotide
  modified_base 4: mod_base = OTHER; note = 5-methyl
  modified_base 13: mod_base = OTHER; note = 5-methyl
  modified_base 17..18: mod_base = OTHER; note = 5-methyl
  modified_base 4: mod_base = OTHER; note = bicyclic nucleic acid (BNA)
  modified_base 15: mod_base = OTHER; note = bicyclic nucleic acid (BNA)
  modified_base 17..18: mod_base = OTHER; note = bicyclic nucleic acid (BNA)
  source 1..18: mol_type = other RNA
agtcggtaagttctgtcc

SEQ ID NO: 14832 - RNA, 18 nt, synthetic construct
  misc_feature 1..18: note = Description of Artificial Sequence: Synthetic Antisense oligonucleotide
  modified_base 4: mod_base = OTHER; note = 5-methyl
  modified_base 13: mod_base = OTHER; note = 5-methyl
  modified_base 17..18: mod_base = OTHER; note = 5-methyl
  modified_base 5: mod_base = OTHER; note = bicyclic nucleic acid (BNA)
  modified_base 10: mod_base = OTHER; note = bicyclic nucleic acid (BNA)
  modified_base 17..18: mod_base = OTHER; note = bicyclic nucleic acid (BNA)
  source 1..18: mol_type = other RNA
agtcggtaagttctgtcc

SEQ ID NO: 14833 - RNA, 18 nt, synthetic construct
  misc_feature 1..18: note = Description of Artificial Sequence: Synthetic Antisense oligonucleotide
  modified_base 4: mod_base = OTHER; note = 5-methyl
  modified_base 13: mod_base = OTHER; note = 5-methyl
  modified_base 17..18: mod_base = OTHER; note = 5-methyl
  modified_base 6: mod_base = OTHER; note = bicyclic nucleic acid (BNA)
  modified_base 13: mod_base = OTHER; note = bicyclic nucleic acid (BNA)
  modified_base 17..18: mod_base = OTHER; note = bicyclic nucleic acid (BNA)
  source 1..18: mol_type = other RNA
agtcggtaagttctgtcc

SEQ ID NO: 14834 - RNA, 18 nt, synthetic construct
  misc_feature 1..18: note = Description of Artificial Sequence: Synthetic Antisense oligonucleotide
  modified_base 2: mod_base = OTHER; note = bicyclic nucleic acid (BNA)
  modified_base 15: mod_base = OTHER; note = bicyclic nucleic acid (BNA)
  modified_base 17..18: mod_base = OTHER; note = bicyclic nucleic acid (BNA)
  modified_base 4: mod_base = OTHER; note = 5-methyl
  modified_base 13: mod_base = OTHER; note = 5-methyl
  modified_base 17..18: mod_base = OTHER; note = 5-methyl
  source 1..18: mol_type = other RNA
agtcggtaagttctgtcc

SEQ ID NO: 14835 - RNA, 18 nt, synthetic construct
  misc_feature 1..18: note = Description of Artificial Sequence: Synthetic Antisense oligonucleotide
  modified_base 2: mod_base = OTHER; note = bicyclic nucleic acid (BNA)
  modified_base 6: mod_base = OTHER; note = bicyclic nucleic acid (BNA)
  modified_base 17..18: mod_base = OTHER; note = bicyclic nucleic acid (BNA)
  modified_base 4: mod_base = OTHER; note = 5-methyl
  modified_base 13: mod_base = OTHER; note = 5-methyl
  modified_base 17..18: mod_base = OTHER; note = 5-methyl
  source 1..18: mol_type = other RNA
agtcggtaagttctgtcc

SEQ ID NO: 14836 - RNA, 18 nt, synthetic construct
  misc_feature 1..18: note = Description of Artificial Sequence: Synthetic Antisense oligonucleotide
  modified_base 4: mod_base = OTHER; note = 5-methyl
  modified_base 13: mod_base = OTHER; note = 5-methyl
  modified_base 17..18: mod_base = OTHER; note = 5-methyl
  modified_base 10: mod_base = OTHER; note = bicyclic nucleic acid (BNA)
  modified_base 15: mod_base = OTHER; note = bicyclic nucleic acid (BNA)
  modified_base 17..18: mod_base = OTHER; note = bicyclic nucleic acid (BNA)
  source 1..18: mol_type = other RNA
agtcggtaagttctgtcc

SEQ ID NO: 14837 - RNA, 18 nt, synthetic construct
  misc_feature 1..18: note = Description of Artificial Sequence: Synthetic Antisense oligonucleotide
  modified_base 4: mod_base = OTHER; note = 5-methyl
  modified_base 13: mod_base = OTHER; note = 5-methyl
  modified_base 17..18: mod_base = OTHER; note = 5-methyl
  modified_base 13: mod_base = OTHER; note = bicyclic nucleic acid (BNA)
  modified_base 15: mod_base = OTHER; note = bicyclic nucleic acid (BNA)
  modified_base 17..18: mod_base = OTHER; note = bicyclic nucleic acid (BNA)
  source 1..18: mol_type = other RNA
agtcggtaagttctgtcc

SEQ ID NO: 14838 - RNA, 18 nt, synthetic construct
  misc_feature 1..18: note = Description of Artificial Sequence: Synthetic Antisense oligonucleotide
  modified_base 4: mod_base = OTHER; note = 5-methyl
  modified_base 13: mod_base = OTHER; note = 5-methyl
  modified_base 17..18: mod_base = OTHER; note = 5-methyl
  modified_base 5..6: mod_base = OTHER; note = bicyclic nucleic acid (BNA)
  modified_base 17..18: mod_base = OTHER; note = bicyclic nucleic acid (BNA)
  source 1..18: mol_type = other RNA
agtcggtaagttctgtcc

SEQ ID NO: 14839 - RNA, 18 nt, synthetic construct
  misc_feature 1..18: note = Description of Artificial Sequence: Synthetic Antisense oligonucleotide
  modified_base 4: mod_base = OTHER; note = 5-methyl
  modified_base 13: mod_base = OTHER; note = 5-methyl
  modified_base 17..18: mod_base = OTHER; note = 5-methyl
  modified_base 5: mod_base = OTHER; note = bicyclic nucleic acid (BNA)
  modified_base 15: mod_base = OTHER; note = bicyclic nucleic acid (BNA)
  modified_base 17..18: mod_base = OTHER; note = bicyclic nucleic acid (BNA)
  source 1..18: mol_type = other RNA
agtcggtaagttctgtcc

SEQ ID NO: 14840 - RNA, 18 nt, synthetic construct
  misc_feature 1..18: note = Description of Artificial Sequence: Synthetic Antisense oligonucleotide
  modified_base 2: mod_base = OTHER; note = bicyclic nucleic acid (BNA)
  modified_base 5: mod_base = OTHER; note = bicyclic nucleic acid (BNA)
  modified_base 17..18: mod_base = OTHER; note = bicyclic nucleic acid (BNA)
  modified_base 4: mod_base = OTHER; note = 5-methyl
  modified_base 13: mod_base = OTHER; note = 5-methyl
  modified_base 17..18: mod_base = OTHER; note = 5-methyl
  source 1..18: mol_type = other RNA
agtcggtaagttctgtcc

SEQ ID NO: 14841 - RNA, 18 nt, synthetic construct
  misc_feature 1..18: note = Description of Artificial Sequence: Synthetic Antisense oligonucleotide
  modified_base 4: mod_base = OTHER; note = 5-methyl
  modified_base 13: mod_base = OTHER; note = 5-methyl
  modified_base 17..18: mod_base = OTHER; note = 5-methyl
  modified_base 4: mod_base = OTHER; note = bicyclic nucleic acid (BNA)
  modified_base 10: mod_base = OTHER; note = bicyclic nucleic acid (BNA)
  modified_base 17..18: mod_base = OTHER; note = bicyclic nucleic acid (BNA)
  source 1..18: mol_type = other RNA
agtcggtaagttctgtcc

SEQ ID NO: 14842 - RNA, 18 nt, synthetic construct
  misc_feature 1..18: note = Description of Artificial Sequence: Synthetic Antisense oligonucleotide
  modified_base 2: mod_base = OTHER; note = bicyclic nucleic acid (BNA)
  modified_base 10: mod_base = OTHER; note = bicyclic nucleic acid (BNA)
  modified_base 17..18: mod_base = OTHER; note = bicyclic nucleic acid (BNA)
  modified_base 4: mod_base = OTHER; note = 5-methyl
  modified_base 13: mod_base = OTHER; note = 5-methyl
  modified_base 17..18: mod_base = OTHER; note = 5-methyl
  source 1..18: mol_type = other RNA
agtcggtaagttctgtcc

SEQ ID NO: 14843 - RNA, 18 nt, synthetic construct
  misc_feature 1..18: note = Description of Artificial Sequence: Synthetic Antisense oligonucleotide
  modified_base 4: mod_base = OTHER; note = 5-methyl
  modified_base 13: mod_base = OTHER; note = 5-methyl
  modified_base 17..18: mod_base = OTHER; note = 5-methyl
  modified_base 4: mod_base = OTHER; note = bicyclic nucleic acid (BNA)
  modified_base 6: mod_base = OTHER; note = bicyclic nucleic acid (BNA)
  modified_base 17..18: mod_base = OTHER; note = bicyclic nucleic acid (BNA)
  source 1..18: mol_type = other RNA
agtcggtaagttctgtcc

SEQ ID NO: 14844 - RNA, 18 nt, synthetic construct
  misc_feature 1..18: note = Description of Artificial Sequence: Synthetic Antisense oligonucleotide
  modified_base 4: mod_base = OTHER; note = 5-methyl
  modified_base 13: mod_base = OTHER; note = 5-methyl
  modified_base 17..18: mod_base = OTHER; note = 5-methyl
  modified_base 4: mod_base = OTHER; note = bicyclic nucleic acid (BNA)
  modified_base 13: mod_base = OTHER; note = bicyclic nucleic acid (BNA)
  modified_base 17..18: mod_base = OTHER; note = bicyclic nucleic acid (BNA)
  source 1..18: mol_type = other RNA
agtcggtaagttctgtcc

SEQ ID NO: 14845 - RNA, 18 nt, synthetic construct
  misc_feature 1..18: note = Description of Artificial Sequence: Synthetic Antisense oligonucleotide
  modified_base 2: mod_base = OTHER; note = bicyclic nucleic acid (BNA)
  modified_base 13: mod_base = OTHER; note = bicyclic nucleic acid (BNA)
  modified_base 17..18: mod_base = OTHER; note = bicyclic nucleic acid (BNA)
  modified_base 4: mod_base = OTHER; note = 5-methyl
  modified_base 13: mod_base = OTHER; note = 5-methyl
  modified_base 17..18: mod_base = OTHER; note = 5-methyl
  source 1..18: mol_type = other RNA
agtcggtaagttctgtcc

SEQ ID NO: 14846 - RNA, 18 nt, synthetic construct
  misc_feature 1..18: note = Description of Artificial Sequence: Synthetic Antisense oligonucleotide
  modified_base 4: mod_base = OTHER; note = 5-methyl
  modified_base 13: mod_base = OTHER; note = 5-methyl
  modified_base 17..18: mod_base = OTHER; note = 5-methyl
  modified_base 6: mod_base = OTHER; note = bicyclic nucleic acid (BNA)
  modified_base 15: mod_base = OTHER; note = bicyclic nucleic acid (BNA)
  modified_base 17..18: mod_base = OTHER; note = bicyclic nucleic acid (BNA)
  source 1..18: mol_type = other RNA
agtcggtaagttctgtcc

SEQ ID NO: 14847 - RNA, 18 nt, synthetic construct
  misc_feature 1..18: note = Description of Artificial Sequence: Synthetic Antisense oligonucleotide
  modified_base 4: mod_base = OTHER; note = 5-methyl
  modified_base 13: mod_base = OTHER; note = 5-methyl
  modified_base 17..18: mod_base = OTHER; note = 5-methyl
  modified_base 4..5: mod_base = OTHER; note = bicyclic nucleic acid (BNA)
  modified_base 17..18: mod_base = OTHER; note = bicyclic nucleic acid (BNA)
  source 1..18: mol_type = other RNA
agtcggtaagttctgtcc

SEQ ID NO: 14848 - RNA, 18 nt, synthetic construct
  misc_feature 1..18: note = Description of Artificial Sequence: Synthetic Antisense oligonucleotide
  modified_base 4: mod_base = OTHER; note = 5-methyl
  modified_base 13: mod_base = OTHER; note = 5-methyl
  modified_base 17..18: mod_base = OTHER; note = 5-methyl
  modified_base 10: mod_base = OTHER; note = bicyclic nucleic acid (BNA)
  modified_base 13: mod_base = OTHER; note = bicyclic nucleic acid (BNA)
  modified_base 17..18: mod_base = OTHER; note = bicyclic nucleic acid (BNA)
  source 1..18: mol_type = other RNA
agtcggtaagttctgtcc

SEQ ID NO: 14849 - RNA, 18 nt, synthetic construct
  misc_feature 1..18: note = Description of Artificial Sequence: Synthetic Antisense oligonucleotide
  modified_base 1: mod_base = OTHER; note = 5-methyl
  modified_base 5..6: mod_base = OTHER; note = 5-methyl
  modified_base 10..12: mod_base = OTHER; note = 5-methyl
  modified_base 6: mod_base = OTHER; note = bicyclic nucleic acid (BNA)
  modified_base 10: mod_base = OTHER; note = bicyclic nucleic acid (BNA)
  modified_base 17..18: mod_base = OTHER; note = bicyclic nucleic acid (BNA)
  source 1..18: mol_type = other RNA
ctgtccaagcccggttga

SEQ ID NO: 14850 - RNA, 18 nt, synthetic construct
  misc_feature 1..18: note = Description of Artificial Sequence: Synthetic Antisense oligonucleotide
  modified_base 1: mod_base = OTHER; note = 5-methyl
  modified_base 5..6: mod_base = OTHER; note = 5-methyl
  modified_base 10..12: mod_base = OTHER; note = 5-methyl
  modified_base 9: mod_base = OTHER; note = bicyclic nucleic acid (BNA)
  modified_base 14: mod_base = OTHER; note = bicyclic nucleic acid (BNA)
  modified_base 17..18: mod_base = OTHER; note = bicyclic nucleic acid (BNA)
  source 1..18: mol_type = other RNA
ctgtccaagcccggttga

SEQ ID NO: 14851 - RNA, 18 nt, synthetic construct
  misc_feature 1..18: note = Description of Artificial Sequence: Synthetic Antisense oligonucleotide
  modified_base 1: mod_base = OTHER; note = 5-methyl
  modified_base 5..6: mod_base = OTHER; note = 5-methyl
  modified_base 10..12: mod_base = OTHER; note = 5-methyl
  modified_base 11..12: mod_base = OTHER; note = bicyclic nucleic acid (BNA)
  modified_base 17..18: mod_base = OTHER; note = bicyclic nucleic acid (BNA)
  source 1..18: mol_type = other RNA
ctgtccaagcccggttga

SEQ ID NO: 14852 - RNA, 18 nt, synthetic construct
  misc_feature 1..18: note = Description of Artificial Sequence: Synthetic Antisense oligonucleotide
  modified_base 1: mod_base = OTHER; note = 5-methyl
  modified_base 5..6: mod_base = OTHER; note = 5-methyl
  modified_base 10..12: mod_base = OTHER; note = 5-methyl
  modified_base 5: mod_base = OTHER; note = bicyclic nucleic acid (BNA)
  modified_base 9: mod_base = OTHER; note = bicyclic nucleic acid (BNA)
  modified_base 17..18: mod_base = OTHER; note = bicyclic nucleic acid (BNA)
  source 1..18: mol_type = other RNA
ctgtccaagcccggttga

SEQ ID NO: 14853 - RNA, 18 nt, synthetic construct
  misc_feature 1..18: note = Description of Artificial Sequence: Synthetic Antisense oligonucleotide
  modified_base 1: mod_base = OTHER; note = 5-methyl
  modified_base 5..6: mod_base = OTHER; note = 5-methyl
  modified_base 10..12: mod_base = OTHER; note = 5-methyl
  modified_base 3: mod_base = OTHER; note = bicyclic nucleic acid (BNA)
  modified_base 9: mod_base = OTHER; note = bicyclic nucleic acid (BNA)
  modified_base 17..18: mod_base = OTHER; note = bicyclic nucleic acid (BNA)
  source 1..18: mol_type = other RNA
ctgtccaagcccggttga

SEQ ID NO: 14854 - RNA, 18 nt, synthetic construct
  misc_feature 1..18: note = Description of Artificial Sequence: Synthetic Antisense oligonucleotide
  modified_base 1: mod_base = OTHER; note = 5-methyl
  modified_base 5..6: mod_base = OTHER; note = 5-methyl
  modified_base 10..12: mod_base = OTHER; note = 5-methyl
  modified_base 6: mod_base = OTHER; note = bicyclic nucleic acid (BNA)
  modified_base 14: mod_base = OTHER; note = bicyclic nucleic acid (BNA)
  modified_base 17..18: mod_base = OTHER; note = bicyclic nucleic acid (BNA)
  source 1..18: mol_type = other RNA
ctgtccaagcccggttga

SEQ ID NO: 14855 - RNA, 18 nt, synthetic construct
  misc_feature 1..18: note = Description of Artificial Sequence: Synthetic Antisense oligonucleotide
  modified_base 1: mod_base = OTHER; note = 5-methyl
  modified_base 5..6: mod_base = OTHER; note = 5-methyl
  modified_base 10..12: mod_base = OTHER; note = 5-methyl
  modified_base 9..10: mod_base = OTHER; note = bicyclic nucleic acid (BNA)
  modified_base 17..18: mod_base = OTHER; note = bicyclic nucleic acid (BNA)
  source 1..18: mol_type = other RNA
ctgtccaagcccggttga

SEQ ID NO: 14856 - RNA, 18 nt, synthetic construct
  misc_feature 1..18: note = Description of Artificial Sequence: Synthetic Antisense oligonucleotide
  modified_base 1: mod_base = OTHER; note = 5-methyl
  modified_base 5..6: mod_base = OTHER; note = 5-methyl
  modified_base 10..12: mod_base = OTHER; note = 5-methyl
  modified_base 5: mod_base = OTHER; note = bicyclic nucleic acid (BNA)
  modified_base 13: mod_base = OTHER; note = bicyclic nucleic acid (BNA)
  modified_base 17..18: mod_base = OTHER; note = bicyclic nucleic acid (BNA)
  source 1..18: mol_type = other RNA
ctgtccaagcccggttga

SEQ ID NO: 14857 - RNA, 18 nt, synthetic construct
  misc_feature 1..18: note = Description of Artificial Sequence: Synthetic Antisense oligonucleotide
  modified_base 1: mod_base = OTHER; note = 5-methyl
  modified_base 5..6: mod_base = OTHER; note = 5-methyl
  modified_base 10..12: mod_base = OTHER; note = 5-methyl
  modified_base 3: mod_base = OTHER; note = bicyclic nucleic acid (BNA)
  modified_base 13: mod_base = OTHER; note = bicyclic nucleic acid (BNA)
  modified_base 17..18: mod_base = OTHER; note = bicyclic nucleic acid (BNA)
  source 1..18: mol_type = other RNA
ctgtccaagcccggttga

SEQ ID NO: 14858 - RNA, 18 nt, synthetic construct
  misc_feature 1..18: note = Description of Artificial Sequence: Synthetic Antisense oligonucleotide
  modified_base 1: mod_base = OTHER; note = 5-methyl
  modified_base 5..6: mod_base = OTHER; note = 5-methyl
  modified_base 10..12: mod_base = OTHER; note = 5-methyl
  modified_base 3: mod_base = OTHER; note = bicyclic nucleic acid (BNA)
  modified_base 6: mod_base = OTHER; note = bicyclic nucleic acid (BNA)
  modified_base 17..18: mod_base = OTHER; note = bicyclic nucleic acid (BNA)
  source 1..18: mol_type = other RNA
ctgtccaagcccggttga

SEQ ID NO: 14859 - RNA, 18 nt, synthetic construct
  misc_feature 1..18: note = Description of Artificial Sequence: Synthetic Antisense oligonucleotide
  modified_base 1: mod_base = OTHER; note = 5-methyl
  modified_base 5..6: mod_base = OTHER; note = 5-methyl
  modified_base 10..12: mod_base = OTHER; note = 5-methyl
  modified_base 6: mod_base = OTHER; note = bicyclic nucleic acid (BNA)
  modified_base 9: mod_base = OTHER; note = bicyclic nucleic acid (BNA)
  modified_base 17..18: mod_base = OTHER; note = bicyclic nucleic acid (BNA)
  source 1..18: mol_type = other RNA
ctgtccaagcccggttga

SEQ ID NO: 14860 - RNA, 18 nt, synthetic construct
  misc_feature 1..18: note = Description of Artificial Sequence: Synthetic Antisense oligonucleotide
  modified_base 1: mod_base = OTHER; note = 5-methyl
  modified_base 5..6: mod_base = OTHER; note = 5-methyl
  modified_base 10..12: mod_base = OTHER; note = 5-methyl
  modified_base 5: mod_base = OTHER; note = bicyclic nucleic acid (BNA)
  modified_base 10: mod_base = OTHER; note = bicyclic nucleic acid (BNA)
  modified_base 17..18: mod_base = OTHER; note = bicyclic nucleic acid (BNA)
  source 1..18: mol_type = other RNA
ctgtccaagcccggttga

SEQ ID NO: 14861 - RNA, 18 nt, synthetic construct
  misc_feature 1..18: note = Description of Artificial Sequence: Synthetic Antisense oligonucleotide
  modified_base 1: mod_base = OTHER; note = 5-methyl
  modified_base 5..6: mod_base = OTHER; note = 5-methyl
  modified_base 10..12: mod_base = OTHER; note = 5-methyl
  modified_base 3: mod_base = OTHER; note = bicyclic nucleic acid (BNA)
  modified_base 10: mod_base = OTHER; note = bicyclic nucleic acid (BNA)
  modified_base 17..18: mod_base = OTHER; note = bicyclic nucleic acid (BNA)
  source 1..18: mol_type = other RNA
ctgtccaagcccggttga

SEQ ID NO: 14862 - RNA, 18 nt, synthetic construct
  misc_feature 1..18: note = Description of Artificial Sequence: Synthetic Antisense oligonucleotide
  modified_base 1: mod_base = OTHER; note = 5-methyl
  modified_base 5..6: mod_base = OTHER; note = 5-methyl
  modified_base 10..12: mod_base = OTHER; note = 5-methyl
  modified_base 13..14: mod_base = OTHER; note = bicyclic nucleic acid (BNA)
  modified_base 17..18: mod_base = OTHER; note = bicyclic nucleic acid (BNA)
  source 1..18: mol_type = other RNA
ctgtccaagcccggttga

SEQ ID NO: 14863 - RNA, 18 nt, synthetic construct
  misc_feature 1..18: note = Description of Artificial Sequence: Synthetic Antisense oligonucleotide
  modified_base 1: mod_base = OTHER; note = 5-methyl
  modified_base 5..6: mod_base = OTHER; note = 5-methyl
  modified_base 10..12: mod_base = OTHER; note = 5-methyl
  modified_base 6: mod_base = OTHER; note = bicyclic nucleic acid (BNA)
  modified_base 13: mod_base = OTHER; note = bicyclic nucleic acid (BNA)
  modified_base 17..18: mod_base = OTHER; note = bicyclic nucleic acid (BNA)
  source 1..18: mol_type = other RNA
ctgtccaagcccggttga

SEQ ID NO: 14864 - RNA, 18 nt, synthetic construct
  misc_feature 1..18: note = Description of Artificial Sequence: Synthetic Antisense oligonucleotide
  modified_base 1: mod_base = OTHER; note = 5-methyl
  modified_base 5..6: mod_base = OTHER; note = 5-methyl
  modified_base 10..12: mod_base = OTHER; note = 5-methyl
  modified_base 9: mod_base = OTHER; note = bicyclic nucleic acid (BNA)
  modified_base 11: mod_base = OTHER; note = bicyclic nucleic acid (BNA)
  modified_base 17..18: mod_base = OTHER; note = bicyclic nucleic acid (BNA)
  source 1..18: mol_type = other RNA
ctgtccaagcccggttga

SEQ ID NO: 14865 - RNA, 18 nt, synthetic construct
  misc_feature 1..18: note = Description of Artificial Sequence: Synthetic Antisense oligonucleotide
  modified_base 1: mod_base = OTHER; note = 5-methyl
  modified_base 5..6: mod_base = OTHER; note = 5-methyl
  modified_base 10..12: mod_base = OTHER; note = 5-methyl
  modified_base 11: mod_base = OTHER; note = bicyclic nucleic acid (BNA)
  modified_base 13: mod_base = OTHER; note = bicyclic nucleic acid (BNA)
  modified_base 17..18: mod_base = OTHER; note = bicyclic nucleic acid (BNA)
  source 1..18: mol_type = other RNA
ctgtccaagcccggttga

SEQ ID NO: 14866 - RNA, 18 nt, synthetic construct
  misc_feature 1..18: note = Description of Artificial Sequence: Synthetic Antisense oligonucleotide
  modified_base 1: mod_base = OTHER; note = 5-methyl
  modified_base 5..6: mod_base = OTHER; note = 5-methyl
  modified_base 10..12: mod_base = OTHER; note = 5-methyl
  modified_base 5: mod_base = OTHER; note = bicyclic nucleic acid (BNA)
  modified_base 14: mod_base = OTHER; note = bicyclic nucleic acid (BNA)
  modified_base 17..18: mod_base = OTHER; note = bicyclic nucleic acid (BNA)
  source 1..18: mol_type = other RNA
ctgtccaagcccggttga

SEQ ID NO: 14867 - RNA, 18 nt, synthetic construct
  misc_feature 1..18: note = Description of Artificial Sequence: Synthetic Antisense oligonucleotide
  modified_base 1: mod_base = OTHER; note = 5-methyl
  modified_base 5..6: mod_base = OTHER; note = 5-methyl
  modified_base 10..12: mod_base = OTHER; note = 5-methyl
  modified_base 3: mod_base = OTHER; note = bicyclic nucleic acid (BNA)
  modified_base 14: mod_base = OTHER; note = bicyclic nucleic acid (BNA)
  modified_base 17..18: mod_base = OTHER; note = bicyclic nucleic acid (BNA)
  source 1..18: mol_type = other RNA
ctgtccaagcccggttga

SEQ ID NO: 14868 - RNA, 18 nt, synthetic construct
  misc_feature 1..18: note = Description of Artificial Sequence: Synthetic Antisense oligonucleotide
  modified_base 1: mod_base = OTHER; note = 5-methyl
  modified_base 5..6: mod_base = OTHER; note = 5-methyl
  modified_base 10..12: mod_base = OTHER; note = 5-methyl
  modified_base 10: mod_base = OTHER; note = bicyclic nucleic acid (BNA)
  modified_base 12: mod_base = OTHER; note = bicyclic nucleic acid (BNA)
  modified_base 17..18: mod_base = OTHER; note = bicyclic nucleic acid (BNA)
  source 1..18: mol_type = other RNA
ctgtccaagcccggttga

SEQ ID NO: 14869 - RNA, 18 nt, synthetic construct
  misc_feature 1..18: note = Description of Artificial Sequence: Synthetic Antisense oligonucleotide
  modified_base 1: mod_base = OTHER; note = 5-methyl
  modified_base 5..6: mod_base = OTHER; note = 5-methyl
  modified_base 10..12: mod_base = OTHER; note = 5-methyl
  modified_base 12: mod_base = OTHER; note = bicyclic nucleic acid (BNA)
  modified_base 14: mod_base = OTHER; note = bicyclic nucleic acid (BNA)
  modified_base 17..18: mod_base = OTHER; note = bicyclic nucleic acid (BNA)
  source 1..18: mol_type = other RNA
ctgtccaagcccggttga

SEQ ID NO: 14870 - RNA, 18 nt, synthetic construct
  misc_feature 1..18: note = Description of Artificial Sequence: Synthetic Antisense oligonucleotide
  modified_base 1: mod_base = OTHER; note = 5-methyl
  modified_base 5..6: mod_base = OTHER; note = 5-methyl
  modified_base 10..12: mod_base = OTHER; note = 5-methyl
  modified_base 5: mod_base = OTHER; note = bicyclic nucleic acid (BNA)
  modified_base 11: mod_base = OTHER; note = bicyclic nucleic acid (BNA)
  modified_base 17..18: mod_base = OTHER; note = bicyclic nucleic acid (BNA)
  source 1..18: mol_type = other RNA
ctgtccaagcccggttga

SEQ ID NO: 14871 - RNA, 18 nt, synthetic construct
  misc_feature 1..18: note = Description of Artificial Sequence: Synthetic Antisense oligonucleotide
  modified_base 1: mod_base = OTHER; note = 5-methyl
  modified_base 5..6: mod_base = OTHER; note = 5-methyl
  modified_base 10..12: mod_base = OTHER; note = 5-methyl
  modified_base 6: mod_base = OTHER; note = bicyclic nucleic acid (BNA)
  modified_base 12: mod_base = OTHER; note = bicyclic nucleic acid (BNA)
  modified_base 17..18: mod_base = OTHER; note = bicyclic nucleic acid (BNA)
  source 1..18: mol_type = other RNA
ctgtccaagcccggttga

SEQ ID NO: 14872 - RNA, 18 nt, synthetic construct
  misc_feature 1..18: note = Description of Artificial Sequence: Synthetic Antisense oligonucleotide
  modified_base 1: mod_base = OTHER; note = 5-methyl
  modified_base 5..6: mod_base = OTHER; note = 5-methyl
  modified_base 10..12: mod_base = OTHER; note = 5-methyl
  modified_base 5..6: mod_base = OTHER; note = bicyclic nucleic acid (BNA)
  modified_base 17..18: mod_base = OTHER; note = bicyclic nucleic acid (BNA)
  source 1..18: mol_type = other RNA
ctgtccaagcccggttga

SEQ ID NO: 14873 - RNA, 18 nt, synthetic construct
  misc_feature 1..18: note = Description of Artificial Sequence: Synthetic Antisense oligonucleotide
  modified_base 1: mod_base = OTHER; note = 5-methyl
  modified_base 5..6: mod_base = OTHER; note = 5-methyl
  modified_base 10..12: mod_base = OTHER; note = 5-methyl
  modified_base 11: mod_base = OTHER; note = bicyclic nucleic acid (BNA)
  modified_base 14: mod_base = OTHER; note = bicyclic nucleic acid (BNA)
  modified_base 17..18: mod_base = OTHER; note = bicyclic nucleic acid (BNA)
  source 1..18: mol_type = other RNA
ctgtccaagcccggttga

SEQ ID NO: 14874 - RNA, 18 nt, synthetic construct
  misc_feature 1..18: note = Description of Artificial Sequence: Synthetic Antisense oligonucleotide
  modified_base 1: mod_base = OTHER; note = 5-methyl
  modified_base 5..6: mod_base = OTHER; note = 5-methyl
  modified_base 10..12: mod_base = OTHER; note = 5-methyl
  modified_base 9: mod_base = OTHER; note = bicyclic nucleic acid (BNA)
  modified_base 12: mod_base = OTHER; note = bicyclic nucleic acid (BNA)
  modified_base 17..18: mod_base = OTHER; note = bicyclic nucleic acid (BNA)
  source 1..18: mol_type = other RNA
ctgtccaagcccggttga

SEQ ID NO: 14875 - RNA, 18 nt, synthetic construct
  misc_feature 1..18: note = Description of Artificial Sequence: Synthetic Antisense oligonucleotide
  modified_base 1: mod_base = OTHER; note = 5-methyl
  modified_base 5..6: mod_base = OTHER; note = 5-methyl
  modified_base 10..12: mod_base = OTHER; note = 5-methyl
  modified_base 3: mod_base = OTHER; note = bicyclic nucleic acid (BNA)
  modified_base 11: mod_base = OTHER; note = bicyclic nucleic acid (BNA)
  modified_base 17..18: mod_base = OTHER; note = bicyclic nucleic acid (BNA)
  source 1..18: mol_type = other RNA
ctgtccaagcccggttga

SEQ ID NO: 14876 - RNA, 18 nt, synthetic construct
  misc_feature 1..18: note = Description of Artificial Sequence: Synthetic Antisense oligonucleotide
  modified_base 1: mod_base = OTHER; note = 5-methyl
  modified_base 5..6: mod_base = OTHER; note = 5-methyl
  modified_base 10..12: mod_base = OTHER; note = 5-methyl
  modified_base 10..11: mod_base = OTHER; note = bicyclic nucleic acid (BNA)
  modified_base 17..18: mod_base = OTHER; note = bicyclic nucleic acid (BNA)
  source 1..18: mol_type = other RNA
ctgtccaagcccggttga

SEQ ID NO: 14877 - RNA, 18 nt, synthetic construct
  misc_feature 1..18: note = Description of Artificial Sequence: Synthetic Antisense oligonucleotide
  modified_base 1: mod_base = OTHER; note = 5-methyl
  modified_base 5..6: mod_base = OTHER; note = 5-methyl
  modified_base 10..12: mod_base = OTHER; note = 5-methyl
  modified_base 12..13: mod_base = OTHER; note = bicyclic nucleic acid (BNA)
  modified_base 17..18: mod_base = OTHER; note = bicyclic nucleic acid (BNA)
  source 1..18: mol_type = other RNA
ctgtccaagcccggttga

SEQ ID NO: 14878 - RNA, 18 nt, synthetic construct
  misc_feature 1..18: note = Description of Artificial Sequence: Synthetic Antisense oligonucleotide
  modified_base 1: mod_base = OTHER; note = 5-methyl
  modified_base 5..6: mod_base = OTHER; note = 5-methyl
  modified_base 10..12: mod_base = OTHER; note = 5-methyl
  modified_base 5: mod_base = OTHER; note = bicyclic nucleic acid (BNA)
  modified_base 12: mod_base = OTHER; note = bicyclic nucleic acid (BNA)
  modified_base 17..18: mod_base = OTHER; note = bicyclic nucleic acid (BNA)
  source 1..18: mol_type = other RNA
ctgtccaagcccggttga

SEQ ID NO: 14879 - RNA, 18 nt, synthetic construct
  misc_feature 1..18: note = Description of Artificial Sequence: Synthetic Antisense oligonucleotide
  modified_base 1: mod_base = OTHER; note = 5-methyl
  modified_base 5..6: mod_base = OTHER; note = 5-methyl
  modified_base 10..12: mod_base = OTHER; note = 5-methyl
  modified_base 10: mod_base = OTHER; note = bicyclic nucleic acid (BNA)
  modified_base 14: mod_base = OTHER; note = bicyclic nucleic acid (BNA)
  modified_base 17..18: mod_base = OTHER; note = bicyclic nucleic acid (BNA)
  source 1..18: mol_type = other RNA
ctgtccaagcccggttga

SEQ ID NO: 14880 - RNA, 18 nt, synthetic construct
  misc_feature 1..18: note = Description of Artificial Sequence: Synthetic Antisense oligonucleotide
  modified_base 1: mod_base = OTHER; note = 5-methyl
  modified_base 5..6: mod_base = OTHER; note = 5-methyl
  modified_base 10..12: mod_base = OTHER; note = 5-methyl
  modified_base 6: mod_base = OTHER; note = bicyclic nucleic acid (BNA)
  modified_base 11: mod_base = OTHER; note = bicyclic nucleic acid (BNA)
  modified_base 17..18: mod_base = OTHER; note = bicyclic nucleic acid (BNA)
  source 1..18: mol_type = other RNA
ctgtccaagcccggttga

SEQ ID NO: 14881 - RNA, 18 nt, synthetic construct
  misc_feature 1..18: note = Description of Artificial Sequence: Synthetic Antisense oligonucleotide
  modified_base 1: mod_base = OTHER; note = 5-methyl
  modified_base 5..6: mod_base = OTHER; note = 5-methyl
  modified_base 10..12: mod_base = OTHER; note = 5-methyl
  modified_base 9: mod_base = OTHER; note = bicyclic nucleic acid (BNA)
  modified_base 13: mod_base = OTHER; note = bicyclic nucleic acid (BNA)
  modified_base 17..18: mod_base = OTHER; note = bicyclic nucleic acid (BNA)
  source 1..18: mol_type = other RNA
ctgtccaagcccggttga

SEQ ID NO: 14882 - RNA, 18 nt, synthetic construct
  misc_feature 1..18: note = Description of Artificial Sequence: Synthetic Antisense oligonucleotide
  modified_base 1: mod_base = OTHER; note = 5-methyl
  modified_base 5..6: mod_base = OTHER; note = 5-methyl
  modified_base 10..12: mod_base = OTHER; note = 5-methyl
  modified_base 3: mod_base = OTHER; note = bicyclic nucleic acid (BNA)
  modified_base 12: mod_base = OTHER; note = bicyclic nucleic acid (BNA)
  modified_base 17..18: mod_base = OTHER; note = bicyclic nucleic acid (BNA)
  source 1..18: mol_type = other RNA
ctgtccaagcccggttga

SEQ ID NO: 14883 - RNA, 18 nt, synthetic construct
  misc_feature 1..18: note = Description of Artificial Sequence: Synthetic Antisense oligonucleotide
  modified_base 1: mod_base = OTHER; note = 5-methyl
  modified_base 5..6: mod_base = OTHER; note = 5-methyl
  modified_base 10..12: mod_base = OTHER; note = 5-methyl
  modified_base 3: mod_base = OTHER; note = bicyclic nucleic acid (BNA)
  modified_base 5: mod_base = OTHER; note = bicyclic nucleic acid (BNA)
  modified_base 17..18: mod_base = OTHER; note = bicyclic nucleic acid (BNA)
  source 1..18: mol_type = other RNA
ctgtccaagcccggttga

SEQ ID NO: 14884 - RNA, 18 nt, synthetic construct
  misc_feature 1..18: note = Description of Artificial Sequence: Synthetic Antisense oligonucleotide
  modified_base 1: mod_base = OTHER; note = 5-methyl
  modified_base 5..6: mod_base = OTHER; note = 5-methyl
  modified_base 10..12: mod_base = OTHER; note = 5-methyl
  modified_base 10: mod_base = OTHER; note = bicyclic nucleic acid (BNA)
  modified_base 13: mod_base = OTHER; note = bicyclic nucleic acid (BNA)
  modified_base 17..18: mod_base = OTHER; note = bicyclic nucleic acid (BNA)
  source 1..18: mol_type = other RNA
ctgtccaagcccggttga

SEQ ID NO: 14885 - DNA, 20 bp, synthetic construct
  misc_feature 1..20: note = Description of Artificial Sequence: Synthetic Antisense oligonucleotide
  misc_feature 1..20: note = Original Sequence: ucaaggaagauggcauuuct
  modified_base 2: mod_base = OTHER; note = 5-methyl
  modified_base 14: mod_base = OTHER; note = 5-methyl
  modified_base 19: mod_base = OTHER; note = 5-methyl
  modified_base 2: mod_base = OTHER; note = bicyclic nucleic acid (BNA)
  modified_base 19..20: mod_base = OTHER; note = bicyclic nucleic acid (BNA)
  source 1..20: mol_type = other DNA
  modified_base 1: mod_base = OTHER; note = Uracil
  modified_base 11: mod_base = OTHER; note = Uracil
  modified_base 16: mod_base = OTHER; note = Uracil
  modified_base 17: mod_base = OTHER; note = Uracil
  modified_base 18: mod_base = OTHER; note = Uracil
tcaaggaagatggcatttct

SEQ ID NO: 14886 - DNA, 20 bp, synthetic construct
  misc_feature 1..20: note = Description of Artificial Sequence: Synthetic Antisense oligonucleotide
  misc_feature 1..20: note = Original Sequence: ucaaggaagauggcauuuct
  modified_base 2: mod_base = OTHER; note = 5-methyl
  modified_base 14: mod_base = OTHER; note = 5-methyl
  modified_base 19: mod_base = OTHER; note = 5-methyl
  modified_base 9: mod_base = OTHER; note = bicyclic nucleic acid (BNA)
  modified_base 19..20: mod_base = OTHER; note = bicyclic nucleic acid (BNA)
  source 1..20: mol_type = other DNA
  modified_base 1: mod_base = OTHER; note = Uracil
  modified_base 11: mod_base = OTHER; note = Uracil
  modified_base 16: mod_base = OTHER; note = Uracil
  modified_base 17: mod_base = OTHER; note = Uracil
  modified_base 18: mod_base = OTHER; note = Uracil
tcaaggaagatggcatttct

SEQ ID NO: 14887 - DNA, 20 bp, synthetic construct
  misc_feature 1..20: note = Description of Artificial Sequence: Synthetic Antisense oligonucleotide
  misc_feature 1..20: note = Original Sequence: ucaaggaagauggcauuuct
  modified_base 2: mod_base = OTHER; note = 5-methyl
  modified_base 14: mod_base = OTHER; note = 5-methyl
  modified_base 19: mod_base = OTHER; note = 5-methyl
  modified_base 5: mod_base = OTHER; note = bicyclic nucleic acid (BNA)
  modified_base 19..20: mod_base = OTHER; note = bicyclic nucleic acid (BNA)
  source 1..20: mol_type = other DNA
  modified_base 1: mod_base = OTHER; note = Uracil
  modified_base 11: mod_base = OTHER; note = Uracil
  modified_base 16: mod_base = OTHER; note = Uracil
  modified_base 17: mod_base = OTHER; note = Uracil
  modified_base 18: mod_base = OTHER; note = Uracil
tcaaggaagatggcatttct

SEQ ID NO: 14888 - DNA, 20 bp, synthetic construct
  misc_feature 1..20: note = Description of Artificial Sequence: Synthetic Antisense oligonucleotide
  misc_feature 1..20: note = Original Sequence: ucaaggaagauggcauuuct
  modified_base 2: mod_base = OTHER; note = 5-methyl
  modified_base 14: mod_base = OTHER; note = 5-methyl
  modified_base 19: mod_base = OTHER; note = 5-methyl
  modified_base 6: mod_base = OTHER; note = bicyclic nucleic acid (BNA)
  modified_base 19..20: mod_base = OTHER; note = bicyclic nucleic acid (BNA)
  source 1..20: mol_type = other DNA
  modified_base 1: mod_base = OTHER; note = Uracil
  modified_base 11: mod_base = OTHER; note = Uracil
  modified_base 16: mod_base = OTHER; note = Uracil
  modified_base 17: mod_base = OTHER; note = Uracil
  modified_base 18: mod_base = OTHER; note = Uracil
tcaaggaagatggcatttct

SEQ ID NO: 14889 - DNA, 20 bp, synthetic construct
  misc_feature 1..20: note = Description of Artificial Sequence: Synthetic Antisense oligonucleotide
  misc_feature 1..20: note = Original Sequence: ucaaggaagauggcauuuct
  modified_base 2: mod_base = OTHER; note = 5-methyl
  modified_base 14: mod_base = OTHER; note = 5-methyl
  modified_base 19: mod_base = OTHER; note = 5-methyl
  modified_base 12: mod_base = OTHER; note = bicyclic nucleic acid (BNA)
  modified_base 19..20: mod_base = OTHER; note = bicyclic nucleic acid (BNA)
  source 1..20: mol_type = other DNA
  modified_base 1: mod_base = OTHER; note = Uracil
  modified_base 11: mod_base = OTHER; note = Uracil
  modified_base 16: mod_base = OTHER; note = Uracil
  modified_base 17: mod_base = OTHER; note = Uracil
  modified_base 18: mod_base = OTHER; note = Uracil
tcaaggaagatggcatttct

SEQ ID NO: 14890 - DNA, 20 bp, synthetic construct
  misc_feature 1..20: note = Description of Artificial Sequence: Synthetic Antisense oligonucleotide
  misc_feature 1..20: note = Original Sequence: ucaaggaagauggcauuuct
  modified_base 2: mod_base = OTHER; note = 5-methyl
  modified_base 14: mod_base = OTHER; note = 5-methyl
  modified_base 19: mod_base = OTHER; note = 5-methyl
  modified_base 13: mod_base = OTHER; note = bicyclic nucleic acid (BNA)
  modified_base 19..20: mod_base = OTHER; note = bicyclic nucleic acid (BNA)
  source 1..20: mol_type = other DNA
  modified_base 1: mod_base = OTHER; note = Uracil
  modified_base 11: mod_base = OTHER; note = Uracil
  modified_base 16: mod_base = OTHER; note = Uracil
  modified_base 17: mod_base = OTHER; note = Uracil
  modified_base 18: mod_base = OTHER; note = Uracil
tcaaggaagatggcatttct

SEQ ID NO: 14891 - DNA, 20 bp, synthetic construct
  misc_feature 1..20: note = Description of Artificial Sequence: Synthetic Antisense oligonucleotide
  misc_feature 1..20: note = Original Sequence: ucaaggaagauggcauuuct
  modified_base 2: mod_base = OTHER; note = 5-methyl
  modified_base 14: mod_base = OTHER; note = 5-methyl
  modified_base 19: mod_base = OTHER; note = 5-methyl
  modified_base 14: mod_base = OTHER; note = bicyclic nucleic acid (BNA)
  modified_base 19..20: mod_base = OTHER; note = bicyclic nucleic acid (BNA)
  source 1..20: mol_type = other DNA
  modified_base 1: mod_base = OTHER; note = Uracil
  modified_base 11: mod_base = OTHER; note = Uracil
  modified_base 16: mod_base = OTHER; note = Uracil
  modified_base 17: mod_base = OTHER; note = Uracil
  modified_base 18: mod_base = OTHER; note = Uracil
tcaaggaagatggcatttct

SEQ ID NO: 14892 - RNA, 22 nt, synthetic construct
  misc_feature 1..22: note = Description of Artificial Sequence: Synthetic Antisense oligonucleotide
  modified_base 2: mod_base = OTHER; note = 5-methyl
  modified_base 14: mod_base = OTHER; note = 5-methyl
  modified_base 19: mod_base = OTHER; note = 5-methyl
  modified_base 2: mod_base = OTHER; note = bicyclic nucleic acid (BNA)
  modified_base 21..22: mod_base = OTHER; note = bicyclic nucleic acid (BNA)
  source 1..22: mol_type = other RNA
tcaaggaagatggcatttctag

SEQ ID NO: 14893 - RNA, 22 nt, synthetic construct
  misc_feature 1..22: note = Description of Artificial Sequence: Synthetic Antisense oligonucleotide
  modified_base 2: mod_base = OTHER; note = 5-methyl
  modified_base 14: mod_base = OTHER; note = 5-methyl
  modified_base 19: mod_base = OTHER; note = 5-methyl
  modified_base 9: mod_base = OTHER; note = bicyclic nucleic acid (BNA)
  modified_base 21..22: mod_base = OTHER; note = bicyclic nucleic acid (BNA)
  source 1..22: mol_type = other RNA
tcaaggaagatggcatttctag

SEQ ID NO: 14894 - RNA, 22 nt, synthetic construct
  misc_feature 1..22: note = Description of Artificial Sequence: Synthetic Antisense oligonucleotide
  modified_base 2: mod_base = OTHER; note = 5-methyl
  modified_base 14: mod_base = OTHER; note = 5-methyl
  modified_base 19: mod_base = OTHER; note = 5-methyl
  modified_base 5: mod_base = OTHER; note = bicyclic nucleic acid (BNA)
  modified_base 21..22: mod_base = OTHER; note = bicyclic nucleic acid (BNA)
  source 1..22: mol_type = other RNA
tcaaggaagatggcatttctag

SEQ ID NO: 14895 - RNA, 22 nt, synthetic construct
  misc_feature 1..22: note = Description of Artificial Sequence: Synthetic Antisense oligonucleotide
  modified_base 2: mod_base = OTHER; note = 5-methyl
  modified_base 14: mod_base = OTHER; note = 5-methyl
  modified_base 19: mod_base = OTHER; note = 5-methyl
  modified_base 6: mod_base = OTHER; note = bicyclic nucleic acid (BNA)
  modified_base 21..22: mod_base = OTHER; note = bicyclic nucleic acid (BNA)
  source 1..22: mol_type = other RNA
tcaaggaagatggcatttctag

SEQ ID NO: 14896 - RNA, 22 nt, synthetic construct
  misc_feature 1..22: note = Description of Artificial Sequence: Synthetic Antisense oligonucleotide
  modified_base 2: mod_base = OTHER; note = 5-methyl
  modified_base 14: mod_base = OTHER; note = 5-methyl
  modified_base 19: mod_base = OTHER; note = 5-methyl
  modified_base 12: mod_base = OTHER; note = bicyclic nucleic acid (BNA)
  modified_base 21..22: mod_base = OTHER; note = bicyclic nucleic acid (BNA)
  source 1..22: mol_type = other RNA
tcaaggaagatggcatttctag

SEQ ID NO: 14897 - RNA, 22 nt, synthetic construct
  misc_feature 1..22: note = Description of Artificial Sequence: Synthetic Antisense oligonucleotide
  modified_base 2: mod_base = OTHER; note = 5-methyl
  modified_base 14: mod_base = OTHER; note = 5-methyl
  modified_base 19: mod_base = OTHER; note = 5-methyl
  modified_base 13: mod_base = OTHER; note = bicyclic nucleic acid (BNA)
  modified_base 21..22: mod_base = OTHER; note = bicyclic nucleic acid (BNA)
  source 1..22: mol_type = other RNA
tcaaggaagatggcatttctag

SEQ ID NO: 14898 - RNA, 22 nt, synthetic construct
  misc_feature 1..22: note = Description of Artificial Sequence: Synthetic Antisense oligonucleotide
  modified_base 2: mod_base = OTHER; note = 5-methyl
  modified_base 14: mod_base = OTHER; note = 5-methyl
  modified_base 19: mod_base = OTHER; note = 5-methyl
  modified_base 19: mod_base = OTHER; note = bicyclic nucleic acid (BNA)
  modified_base 21..22: mod_base = OTHER; note = bicyclic nucleic acid (BNA)
  source 1..22: mol_type = other RNA
tcaaggaagatggcatttctag

SEQ ID NO: 14899 - RNA, 22 nt, synthetic construct
  misc_feature 1..22: note = Description of Artificial Sequence: Synthetic Antisense oligonucleotide
  modified_base 2: mod_base = OTHER; note = 5-methyl
  modified_base 14: mod_base = OTHER; note = 5-methyl
  modified_base 19: mod_base = OTHER; note = 5-methyl
  modified_base 14: mod_base = OTHER; note = bicyclic nucleic acid (BNA)
  modified_base 21..22: mod_base = OTHER; note = bicyclic nucleic acid (BNA)
  source 1..22: mol_type = other RNA
tcaaggaagatggcatttctag

SEQ ID NO: 14900 - DNA, 20 bp, synthetic construct
  misc_feature 1..20: note = Description of Artificial Sequence: Synthetic Antisense oligonucleotide
  misc_feature 1..20: note = Original Sequence: ucaaggaagauggcauuuct
  modified_base 2: mod_base = OTHER; note = 5-methyl
  modified_base 14: mod_base = OTHER; note = 5-methyl
  modified_base 19: mod_base = OTHER; note = 5-methyl
  modified_base 9: mod_base = OTHER; note = bicyclic nucleic acid (BNA)
  modified_base 14: mod_base = OTHER; note = bicyclic nucleic acid (BNA)
  modified_base 19..20: mod_base = OTHER; note = bicyclic nucleic acid (BNA)
  source 1..20: mol_type = other DNA
  modified_base 1: mod_base = OTHER; note = Uracil
  modified_base 11: mod_base = OTHER; note = Uracil
  modified_base 16: mod_base = OTHER; note = Uracil
  modified_base 17: mod_base = OTHER; note = Uracil
  modified_base 18: mod_base = OTHER; note = Uracil
tcaaggaagatggcatttct

SEQ ID NO: 14901 - DNA, 20 bp, synthetic construct
  misc_feature 1..20: note = Description of Artificial Sequence: Synthetic Antisense oligonucleotide
  misc_feature 1..20: note = Original Sequence: ucaaggaagauggcauuuct
  modified_base 2: mod_base = OTHER; note = 5-methyl
  modified_base 14: mod_base = OTHER; note = 5-methyl
  modified_base 19: mod_base = OTHER; note = 5-methyl
  modified_base 5: mod_base = OTHER; note = bicyclic nucleic acid (BNA)
  modified_base 9: mod_base = OTHER; note = bicyclic nucleic acid (BNA)
  modified_base 19..20: mod_base = OTHER; note = bicyclic nucleic acid (BNA)
  source 1..20: mol_type = other DNA
  modified_base 1: mod_base = OTHER; note = Uracil
  modified_base 11: mod_base = OTHER; note = Uracil
  modified_base 16: mod_base = OTHER; note = Uracil
  modified_base 17: mod_base = OTHER; note = Uracil
  modified_base 18: mod_base = OTHER; note = Uracil
tcaaggaagatggcatttct

SEQ ID NO: 14902 - DNA, 20 bp, synthetic construct
  misc_feature 1..20: note = Description of Artificial Sequence: Synthetic Antisense oligonucleotide
  misc_feature 1..20: note = Original Sequence: ucaaggaagauggcauuuct
  modified_base 2: mod_base = OTHER; note = 5-methyl
  modified_base 14: mod_base = OTHER; note = 5-methyl
  modified_base 19: mod_base = OTHER; note = 5-methyl
  modified_base 6: mod_base = OTHER; note = bicyclic nucleic acid (BNA)
  modified_base 14: mod_base = OTHER; note = bicyclic nucleic acid (BNA)
  modified_base 19..20: mod_base = OTHER; note = bicyclic nucleic acid (BNA)
  source 1..20: mol_type = other DNA
  modified_base 1: mod_base = OTHER; note = Uracil
  modified_base 11: mod_base = OTHER; note = Uracil
  modified_base 16: mod_base = OTHER; note = Uracil
  modified_base 17: mod_base = OTHER; note = Uracil
  modified_base 18: mod_base = OTHER; note = Uracil
tcaaggaagatggcatttct

SEQ ID NO: 14903 - DNA, 20 bp, synthetic construct
  misc_feature 1..20: note = Description of Artificial Sequence: Synthetic Antisense oligonucleotide
  misc_feature 1..20: note = Original Sequence: ucaaggaagauggcauuuct
  modified_base 2: mod_base = OTHER; note = 5-methyl
  modified_base 14: mod_base = OTHER; note = 5-methyl
  modified_base 19: mod_base = OTHER; note = 5-methyl
  modified_base 5: mod_base = OTHER; note = bicyclic nucleic acid (BNA)
  modified_base 13: mod_base = OTHER; note = bicyclic nucleic acid (BNA)
  modified_base 19..20: mod_base = OTHER; note = bicyclic nucleic acid (BNA)
  source 1..20: mol_type = other DNA
  modified_base 1: mod_base = OTHER; note = Uracil
  modified_base 11: mod_base = OTHER; note = Uracil
  modified_base 16: mod_base = OTHER; note = Uracil
  modified_base 17: mod_base = OTHER; note = Uracil
  modified_base 18: mod_base = OTHER; note = Uracil
tcaaggaagatggcatttct

SEQ ID NO: 14904 - DNA, 20 bp, synthetic construct
  misc_feature 1..20: note = Description of Artificial Sequence: Synthetic Antisense oligonucleotide
  misc_feature 1..20: note = Original Sequence: ucaaggaagauggcauuuct
  modified_base 2: mod_base = OTHER; note = 5-methyl
  modified_base 14: mod_base = OTHER; note = 5-methyl
  modified_base 19: mod_base = OTHER; note = 5-methyl
  modified_base 2: mod_base = OTHER; note = bicyclic nucleic acid (BNA)
  modified_base 12: mod_base = OTHER; note = bicyclic nucleic acid (BNA)
  modified_base 19..20: mod_base = OTHER; note = bicyclic nucleic acid (BNA)
  source 1..20: mol_type = other DNA
  modified_base 1: mod_base = OTHER; note = Uracil
  modified_base 11: mod_base = OTHER; note = Uracil
  modified_base 16: mod_base = OTHER; note = Uracil
  modified_base 17: mod_base = OTHER; note = Uracil
  modified_base 18: mod_base = OTHER; note = Uracil
tcaaggaagatggcatttct

SEQ ID NO: 14905 - DNA, 20 bp, synthetic construct
  misc_feature 1..20: note = Description of Artificial Sequence: Synthetic Antisense oligonucleotide
  misc_feature 1..20: note = Original Sequence: ucaaggaagauggcauuuct
  modified_base 2: mod_base = OTHER; note = 5-methyl
  modified_base 14: mod_base = OTHER; note = 5-methyl
  modified_base 19: mod_base = OTHER; note = 5-methyl
  modified_base 6: mod_base = OTHER; note = bicyclic nucleic acid (BNA)
  modified_base 9: mod_base = OTHER; note = bicyclic nucleic acid (BNA)
  modified_base 19..20: mod_base = OTHER; note = bicyclic nucleic acid (BNA)
  source 1..20: mol_type = other DNA
  modified_base 1: mod_base = OTHER; note = Uracil
  modified_base 11: mod_base = OTHER; note = Uracil
  modified_base 16: mod_base = OTHER; note = Uracil
  modified_base 17: mod_base = OTHER; note = Uracil
  modified_base 18: mod_base = OTHER; note = Uracil
tcaaggaagatggcatttct

SEQ ID NO: 14906 - DNA, 20 bp, synthetic construct
  misc_feature 1..20: note = Description of Artificial Sequence: Synthetic Antisense oligonucleotide
  misc_feature 1..20: note = Original Sequence: ucaaggaagauggcauuuct
  modified_base 2: mod_base = OTHER; note = 5-methyl
  modified_base 14: mod_base = OTHER; note = 5-methyl
  modified_base 19: mod_base = OTHER; note = 5-methyl
  modified_base 13..14: mod_base = OTHER; note = bicyclic nucleic acid (BNA)
  modified_base 19..20: mod_base = OTHER; note = bicyclic nucleic acid (BNA)
  source 1..20: mol_type = other DNA
  modified_base 1: mod_base = OTHER; note = Uracil
  modified_base 11: mod_base = OTHER; note = Uracil
  modified_base 16: mod_base = OTHER; note = Uracil
  modified_base 17: mod_base = OTHER; note = Uracil
  modified_base 18: mod_base = OTHER; note = Uracil
tcaaggaagatggcatttct

SEQ ID NO: 14907 - DNA, 20 bp, synthetic construct
  misc_feature 1..20: note = Description of Artificial Sequence: Synthetic Antisense oligonucleotide
  misc_feature 1..20: note = Original Sequence: ucaaggaagauggcauuuct
  modified_base 2: mod_base = OTHER; note = 5-methyl
  modified_base 14: mod_base = OTHER; note = 5-methyl
  modified_base 19: mod_base = OTHER; note = 5-methyl
  modified_base 6: mod_base = OTHER; note = bicyclic nucleic acid (BNA)
  modified_base 13: mod_base = OTHER; note = bicyclic nucleic acid (BNA)
  modified_base 19..20: mod_base = OTHER; note = bicyclic nucleic acid (BNA)
  source 1..20: mol_type = other DNA
  modified_base 1: mod_base = OTHER; note = Uracil
  modified_base 11: mod_base = OTHER; note = Uracil
  modified_base 16: mod_base = OTHER; note = Uracil
  modified_base 17: mod_base = OTHER; note = Uracil
  modified_base 18: mod_base = OTHER; note = Uracil
tcaaggaagatggcatttct

SEQ ID NO: 14908 - DNA, 20 bp, synthetic construct
  misc_feature 1..20: note = Description of Artificial Sequence: Synthetic Antisense oligonucleotide
  misc_feature 1..20: note = Original Sequence: ucaaggaagauggcauuuct
  modified_base 2: mod_base = OTHER; note = 5-methyl
  modified_base 14: mod_base = OTHER; note = 5-methyl
  modified_base 19: mod_base = OTHER; note = 5-methyl
  modified_base 5: mod_base = OTHER; note = bicyclic nucleic acid (BNA)
  modified_base 14: mod_base = OTHER; note = bicyclic nucleic acid (BNA)
  modified_base 19..20: mod_base = OTHER; note = bicyclic nucleic acid (BNA)
  source 1..20: mol_type = other DNA
  modified_base 1: mod_base = OTHER; note = Uracil
  modified_base 11: mod_base = OTHER; note = Uracil
  modified_base 16: mod_base = OTHER; note = Uracil
  modified_base 17: mod_base = OTHER; note = Uracil
  modified_base 18: mod_base = OTHER; note = Uracil
tcaaggaagatggcatttct

SEQ ID NO: 14909 - DNA, 20 bp, synthetic construct
  misc_feature 1..20: note = Description of Artificial Sequence: Synthetic Antisense oligonucleotide
  misc_feature 1..20: note = Original Sequence: ucaaggaagauggcauuuct
  modified_base 2: mod_base = OTHER; note = 5-methyl
  modified_base 14: mod_base = OTHER; note = 5-methyl
  modified_base 19: mod_base = OTHER; note = 5-methyl
  modified_base 2: mod_base = OTHER; note = bicyclic nucleic acid (BNA)
  modified_base 6: mod_base = OTHER; note = bicyclic nucleic acid (BNA)
  modified_base 19..20: mod_base = OTHER; note = bicyclic nucleic acid (BNA)
  source 1..20: mol_type = other DNA
  modified_base 1: mod_base = OTHER; note = Uracil
  modified_base 11: mod_base = OTHER; note = Uracil
  modified_base 16: mod_base = OTHER; note = Uracil
  modified_base 17: mod_base = OTHER; note = Uracil
  modified_base 18: mod_base = OTHER; note = Uracil
tcaaggaagatggcatttct

SEQ ID NO: 14910 - DNA, 20 bp, synthetic construct
  misc_feature 1..20: note = Description of Artificial Sequence: Synthetic Antisense oligonucleotide
  misc_feature 1..20: note = Original Sequence: ucaaggaagauggcauuuct
  modified_base 2: mod_base = OTHER; note = 5-methyl
  modified_base 14: mod_base = OTHER; note = 5-methyl
  modified_base 19: mod_base = OTHER; note = 5-methyl
  modified_base 12: mod_base = OTHER; note = bicyclic nucleic acid (BNA)
  modified_base 14: mod_base = OTHER; note = bicyclic nucleic acid (BNA)
  modified_base 19..20: mod_base = OTHER; note = bicyclic nucleic acid (BNA)
  source 1..20: mol_type = other DNA
  modified_base 1: mod_base = OTHER; note = Uracil
  modified_base 11: mod_base = OTHER; note = Uracil
  modified_base 16: mod_base = OTHER; note = Uracil
  modified_base 17: mod_base = OTHER; note = Uracil
  modified_base 18: mod_base = OTHER; note = Uracil
tcaaggaagatggcatttct

SEQ ID NO: 14911 - DNA, 20 bp, synthetic construct
  misc_feature 1..20: note = Description of Artificial Sequence: Synthetic Antisense oligonucleotide
  misc_feature 1..20: note = Original Sequence: ucaaggaagauggcauuuct
  modified_base 2: mod_base = OTHER; note = 5-methyl
  modified_base 14: mod_base = OTHER; note = 5-methyl
  modified_base 19: mod_base = OTHER; note = 5-methyl
  modified_base 6: mod_base = OTHER; note = bicyclic nucleic acid (BNA)
  modified_base 12: mod_base = OTHER; note = bicyclic nucleic acid (BNA)
  modified_base 19..20: mod_base = OTHER; note = bicyclic nucleic acid (BNA)
  source 1..20: mol_type = other DNA
  modified_base 1: mod_base = OTHER; note = Uracil
  modified_base 11: mod_base = OTHER; note = Uracil
  modified_base 16: mod_base = OTHER; note = Uracil
  modified_base 17: mod_base = OTHER; note = Uracil
  modified_base 18: mod_base = OTHER; note = Uracil
tcaaggaagatggcatttct

SEQ ID NO: 14912 - DNA, 20 bp, synthetic construct
  misc_feature 1..20: note = Description of Artificial Sequence: Synthetic Antisense oligonucleotide
  misc_feature 1..20: note = Original Sequence: ucaaggaagauggcauuuct
  modified_base 2: mod_base = OTHER; note = 5-methyl
  modified_base 14: mod_base = OTHER; note = 5-methyl
  modified_base 19: mod_base = OTHER; note = 5-methyl
  modified_base 5..6: mod_base = OTHER; note = bicyclic nucleic acid (BNA)
  modified_base 19..20: mod_base = OTHER; note = bicyclic nucleic acid (BNA)
  source 1..20: mol_type = other DNA
  modified_base 1: mod_base = OTHER; note = Uracil
  modified_base 11: mod_base = OTHER; note = Uracil
  modified_base 16: mod_base = OTHER; note = Uracil
  modified_base 17: mod_base = OTHER; note = Uracil
  modified_base 18: mod_base = OTHER; note = Uracil
tcaaggaagatggcatttct

SEQ ID NO: 14913 - DNA, 20 bp, synthetic construct
  misc_feature 1..20: note = Description of Artificial Sequence: Synthetic Antisense oligonucleotide
  misc_feature 1..20: note = Original Sequence: ucaaggaagauggcauuuct
  modified_base 2: mod_base = OTHER; note = 5-methyl
  modified_base 14: mod_base = OTHER; note = 5-methyl
  modified_base 19: mod_base = OTHER; note = 5-methyl
  modified_base 2: mod_base = OTHER; note = bicyclic nucleic acid (BNA)
  modified_base 14: mod_base = OTHER; note = bicyclic nucleic acid (BNA)
  modified_base 19..20: mod_base = OTHER; note = bicyclic nucleic acid (BNA)
  source 1..20: mol_type = other DNA
  modified_base 1: mod_base = OTHER; note = Uracil
  modified_base 11: mod_base = OTHER; note = Uracil
  modified_base 16: mod_base = OTHER; note = Uracil
  modified_base 17: mod_base = OTHER; note = Uracil
  modified_base 18: mod_base = OTHER; note = Uracil
tcaaggaagatggcatttct

SEQ ID NO: 14914 - DNA, 20 bp, synthetic construct
  misc_feature 1..20: note = Description of Artificial Sequence: Synthetic Antisense oligonucleotide
  misc_feature 1..20: note = Original Sequence: ucaaggaagauggcauuuct
  modified_base 2: mod_base = OTHER; note = 5-methyl
  modified_base 14: mod_base = OTHER; note = 5-methyl
  modified_base 19: mod_base = OTHER; note = 5-methyl
  modified_base 9: mod_base = OTHER; note = bicyclic nucleic acid (BNA)
  modified_base 12: mod_base = OTHER; note = bicyclic nucleic acid (BNA)
  modified_base 19..20: mod_base = OTHER; note = bicyclic nucleic acid (BNA)
  source 1..20: mol_type = other DNA
  modified_base 1: mod_base = OTHER; note = Uracil
  modified_base 11: mod_base = OTHER; note = Uracil
  modified_base 16: mod_base = OTHER; note = Uracil
  modified_base 17: mod_base = OTHER; note = Uracil
  modified_base 18: mod_base = OTHER; note = Uracil
tcaaggaagatggcatttct

SEQ ID NO: 14915 - DNA, 20 bp, synthetic construct
  misc_feature 1..20: note = Description of Artificial Sequence: Synthetic Antisense oligonucleotide
  misc_feature 1..20: note = Original Sequence: ucaaggaagauggcauuuct
  modified_base 2: mod_base = OTHER; note = 5-methyl
  modified_base 14: mod_base = OTHER; note = 5-methyl
  modified_base 19: mod_base = OTHER; note = 5-methyl
  modified_base 2: mod_base = OTHER; note = bicyclic nucleic acid (BNA)
  modified_base 5: mod_base = OTHER; note = bicyclic nucleic acid (BNA)
  modified_base 19..20: mod_base = OTHER; note = bicyclic nucleic acid (BNA)
  source 1..20: mol_type = other DNA
  modified_base 1: mod_base = OTHER; note = Uracil
  modified_base 11: mod_base = OTHER; note = Uracil
  modified_base 16: mod_base = OTHER; note = Uracil
  modified_base 17: mod_base = OTHER; note = Uracil
  modified_base 18: mod_base = OTHER; note = Uracil
tcaaggaagatggcatttct

SEQ ID NO: 14916 - DNA, 20 bp, synthetic construct
  misc_feature 1..20: note = Description of Artificial Sequence: Synthetic Antisense oligonucleotide
  misc_feature 1..20: note = Original Sequence: ucaaggaagauggcauuuct
  modified_base 2: mod_base = OTHER; note = 5-methyl
  modified_base 14: mod_base = OTHER; note = 5-methyl
  modified_base 19: mod_base = OTHER; note = 5-methyl
  modified_base 12..13: mod_base = OTHER; note = bicyclic nucleic acid (BNA)
  modified_base 19..20: mod_base = OTHER; note = bicyclic nucleic acid (BNA)
  source 1..20: mol_type = other DNA
  modified_base 1: mod_base = OTHER; note = Uracil
  modified_base 11: mod_base = OTHER; note = Uracil
  modified_base 16: mod_base = OTHER; note = Uracil
  modified_base 17: mod_base = OTHER; note = Uracil
  modified_base 18: mod_base = OTHER; note = Uracil
tcaaggaagatggcatttct

SEQ ID NO: 14917 - DNA, 20 bp, synthetic construct
  misc_feature 1..20: note = Description of Artificial Sequence: Synthetic Antisense oligonucleotide
  misc_feature 1..20: note = Original Sequence: ucaaggaagauggcauuuct
  modified_base 2: mod_base = OTHER; note = 5-methyl
  modified_base 14: mod_base = OTHER; note = 5-methyl
  modified_base 19: mod_base = OTHER; note = 5-methyl
  modified_base 5: mod_base = OTHER; note = bicyclic nucleic acid (BNA)
  modified_base 12: mod_base = OTHER; note = bicyclic nucleic acid (BNA)
  modified_base 19..20: mod_base = OTHER; note = bicyclic nucleic acid (BNA)
  source 1..20: mol_type = other DNA
  modified_base 1: mod_base = OTHER; note = Uracil
  modified_base 11: mod_base = OTHER; note = Uracil
  modified_base 16: mod_base = OTHER; note = Uracil
  modified_base 17: mod_base = OTHER; note = Uracil
  modified_base 18: mod_base = OTHER; note = Uracil
tcaaggaagatggcatttct

SEQ ID NO: 14918 - DNA, 20 bp, synthetic construct
  misc_feature 1..20: note = Description of Artificial Sequence: Synthetic Antisense oligonucleotide
  misc_feature 1..20: note = Original Sequence: ucaaggaagauggcauuuct
  modified_base 2: mod_base = OTHER; note = 5-methyl
  modified_base 14: mod_base = OTHER; note = 5-methyl
  modified_base 19: mod_base = OTHER; note = 5-methyl
  modified_base 2: mod_base = OTHER; note = bicyclic nucleic acid (BNA)
  modified_base 13: mod_base = OTHER; note = bicyclic nucleic acid (BNA)
  modified_base 19..20: mod_base = OTHER; note = bicyclic nucleic acid (BNA)
  source 1..20: mol_type = other DNA
  modified_base 1: mod_base = OTHER; note = Uracil
  modified_base 11: mod_base = OTHER; note = Uracil
  modified_base 16: mod_base = OTHER; note = Uracil
  modified_base 17: mod_base = OTHER; note = Uracil
  modified_base 18: mod_base = OTHER; note = Uracil
tcaaggaagatggcatttct

SEQ ID NO: 14919 - DNA, 20 bp, synthetic construct
  misc_feature 1..20: note = Description of Artificial Sequence: Synthetic Antisense oligonucleotide
  misc_feature 1..20: note = Original Sequence: ucaaggaagauggcauuuct
  modified_base 2: mod_base = OTHER; note = 5-methyl
  modified_base 14: mod_base = OTHER; note = 5-methyl
  modified_base 19: mod_base = OTHER; note = 5-methyl
  modified_base 9: mod_base = OTHER; note = bicyclic nucleic acid (BNA)
  modified_base 13: mod_base = OTHER; note = bicyclic nucleic acid (BNA)
  modified_base 19..20: mod_base = OTHER; note = bicyclic nucleic acid (BNA)
  source 1..20: mol_type = other DNA
  modified_base 1: mod_base = OTHER; note = Uracil
  modified_base 11: mod_base = OTHER; note = Uracil
  modified_base 16: mod_base = OTHER; note = Uracil
  modified_base 17: mod_base = OTHER; note = Uracil
  modified_base 18: mod_base = OTHER; note = Uracil
tcaaggaagatggcatttct

SEQ ID NO: 14920 - DNA, 20 bp, synthetic construct
  misc_feature 1..20: note = Description of Artificial Sequence: Synthetic Antisense oligonucleotide
  misc_feature 1..20: note = Original Sequence: ucaaggaagauggcauuuct
  modified_base 2: mod_base = OTHER; note = 5-methyl
  modified_base 14: mod_base = OTHER; note = 5-methyl
  modified_base 19: mod_base = OTHER; note = 5-methyl
  modified_base 2: mod_base = OTHER; note = bicyclic nucleic acid (BNA)
  modified_base 9: mod_base = OTHER; note = bicyclic nucleic acid (BNA)
  modified_base 19..20: mod_base = OTHER; note = bicyclic nucleic acid (BNA)
  source 1..20: mol_type = other DNA
  modified_base 1: mod_base = OTHER; note = Uracil
  modified_base 11: mod_base = OTHER; note = Uracil
  modified_base 16: mod_base = OTHER; note = Uracil
  modified_base 17: mod_base = OTHER; note = Uracil
  modified_base 18: mod_base = OTHER; note = Uracil
tcaaggaagatggcatttct

SEQ ID NO: 14921 - RNA, 22 nt, synthetic construct
  misc_feature 1..22: note = Description of Artificial Sequence: Synthetic Antisense oligonucleotide
  modified_base 2: mod_base = OTHER; note = 5-methyl
  modified_base 14: mod_base = OTHER; note = 5-methyl
  modified_base 19: mod_base = OTHER; note = 5-methyl
  modified_base 9: mod_base = OTHER; note = bicyclic nucleic acid (BNA)
  modified_base 14: mod_base = OTHER; note = bicyclic nucleic acid (BNA)
  modified_base 21..22: mod_base = OTHER; note = bicyclic nucleic acid (BNA)
  source 1..22: mol_type = other RNA
tcaaggaagatggcatttctag

SEQ ID NO: 14922 - RNA, 22 nt, synthetic construct
  misc_feature 1..22: note = Description of Artificial Sequence: Synthetic Antisense oligonucleotide
  modified_base 2: mod_base = OTHER; note = 5-methyl
  modified_base 14: mod_base = OTHER; note = 5-methyl
  modified_base 19: mod_base = OTHER; note = 5-methyl
  modified_base 5: mod_base = OTHER; note = bicyclic nucleic acid (BNA)
  modified_base 9: mod_base = OTHER; note = bicyclic nucleic acid (BNA)
  modified_base 21..22: mod_base = OTHER; note = bicyclic nucleic acid (BNA)
  source 1..22: mol_type = other RNA
tcaaggaagatggcatttctag

SEQ ID NO: 14923 - RNA, 22 nt, synthetic construct
  misc_feature 1..22: note = Description of Artificial Sequence: Synthetic Antisense oligonucleotide
  modified_base 2: mod_base = OTHER; note = 5-methyl
  modified_base 14: mod_base = OTHER; note = 5-methyl
  modified_base 19: mod_base = OTHER; note = 5-methyl
  modified_base 5: mod_base = OTHER; note = bicyclic nucleic acid (BNA)
  modified_base 19: mod_base = OTHER; note = bicyclic nucleic acid (BNA)
  modified_base 21..22: mod_base = OTHER; note = bicyclic nucleic acid (BNA)
  source 1..22: mol_type = other RNA
tcaaggaagatggcatttctag

SEQ ID NO: 14924 - RNA, 22 nt, synthetic construct
  misc_feature 1..22: note = Description of Artificial Sequence: Synthetic Antisense oligonucleotide
  modified_base 2: mod_base = OTHER; note = 5-methyl
  modified_base 14: mod_base = OTHER; note = 5-methyl
  modified_base 19: mod_base = OTHER; note = 5-methyl
  modified_base 6: mod_base = OTHER; note = bicyclic nucleic acid (BNA)
  modified_base 14: mod_base = OTHER; note = bicyclic nucleic acid (BNA)
  modified_base 21..22: mod_base = OTHER; note = bicyclic nucleic acid (BNA)
  source 1..22: mol_type = other RNA
tcaaggaagatggcatttctag

SEQ ID NO: 14925 - RNA, 22 nt, synthetic construct
  misc_feature 1..22: note = Description of Artificial Sequence: Synthetic Antisense oligonucleotide
  modified_base 2: mod_base = OTHER; note = 5-methyl
  modified_base 14: mod_base = OTHER; note = 5-methyl
  modified_base 19: mod_base = OTHER; note = 5-methyl
  modified_base 5: mod_base = OTHER; note = bicyclic nucleic acid (BNA)
  modified_base 13: mod_base = OTHER; note = bicyclic nucleic acid (BNA)
  modified_base 21..22: mod_base = OTHER; note = bicyclic nucleic acid (BNA)
  source 1..22: mol_type = other RNA
tcaaggaagatggcatttctag

SEQ ID NO: 14926 - RNA, 22 nt, synthetic construct
  misc_feature 1..22: note = Description of Artificial Sequence: Synthetic Antisense oligonucleotide
  modified_base 2: mod_base = OTHER; note = 5-methyl
  modified_base 14: mod_base = OTHER; note = 5-methyl
  modified_base 19: mod_base = OTHER; note = 5-methyl
  modified_base 2: mod_base = OTHER; note = bicyclic nucleic acid (BNA)
  modified_base 12: mod_base = OTHER; note = bicyclic nucleic acid (BNA)
  modified_base 21..22: mod_base = OTHER; note = bicyclic nucleic acid (BNA)
  source 1..22: mol_type = other RNA
tcaaggaagatggcatttctag

SEQ ID NO: 14927 - RNA, 22 nt, synthetic construct
  misc_feature 1..22: note = Description of Artificial Sequence: Synthetic Antisense oligonucleotide
  modified_base 2: mod_base = OTHER; note = 5-methyl
  modified_base 14: mod_base = OTHER; note = 5-methyl
  modified_base 19: mod_base = OTHER; note = 5-methyl
  modified_base 6: mod_base = OTHER; note = bicyclic nucleic acid (BNA)
  modified_base 9: mod_base = OTHER; note = bicyclic nucleic acid (BNA)
  modified_base 21..22: mod_base = OTHER; note = bicyclic nucleic acid (BNA)
  source 1..22: mol_type = other RNA
tcaaggaagatggcatttctag

SEQ ID NO: 14928 - RNA, 22 nt, synthetic construct
  misc_feature 1..22: note = Description of Artificial Sequence: Synthetic Antisense oligonucleotide
  modified_base 2: mod_base = OTHER; note = 5-methyl
  modified_base 14: mod_base = OTHER; note = 5-methyl
  modified_base 19: mod_base = OTHER; note = 5-methyl
  modified_base 13..14: mod_base = OTHER; note = bicyclic nucleic acid (BNA)
  modified_base 21..22: mod_base = OTHER; note = bicyclic nucleic acid (BNA)
  source 1..22: mol_type = other RNA
tcaaggaagatggcatttctag

SEQ ID NO: 14929 - RNA, 22 nt, synthetic construct
  misc_feature 1..22: note = Description of Artificial Sequence: Synthetic Antisense oligonucleotide
  modified_base 2: mod_base = OTHER; note = 5-methyl
  modified_base 14: mod_base = OTHER; note = 5-methyl
  modified_base 19: mod_base = OTHER; note = 5-methyl
  modified_base 6: mod_base = OTHER; note = bicyclic nucleic acid (BNA)
  modified_base 13: mod_base = OTHER; note = bicyclic nucleic acid (BNA)
  modified_base 21..22: mod_base = OTHER; note = bicyclic nucleic acid (BNA)
  source 1..22: mol_type = other RNA
tcaaggaagatggcatttctag

SEQ ID NO: 14930 - RNA, 22 nt, synthetic construct
  misc_feature 1..22: note = Description of Artificial Sequence: Synthetic Antisense oligonucleotide
  modified_base 2: mod_base = OTHER; note = 5-methyl
  modified_base 14: mod_base = OTHER; note = 5-methyl
  modified_base 19: mod_base = OTHER; note = 5-methyl
  modified_base 6: mod_base = OTHER; note = bicyclic nucleic acid (BNA)
  modified_base 19: mod_base = OTHER; note = bicyclic nucleic acid (BNA)
  modified_base 21..22: mod_base = OTHER; note = bicyclic nucleic acid (BNA)
  source 1..22: mol_type = other RNA
tcaaggaagatggcatttctag

SEQ ID NO: 14931 - RNA, 22 nt, synthetic construct
  misc_feature 1..22: note = Description of Artificial Sequence: Synthetic Antisense oligonucleotide
  modified_base 2: mod_base = OTHER; note = 5-methyl
  modified_base 14: mod_base = OTHER; note = 5-methyl
  modified_base 19: mod_base = OTHER; note = 5-methyl
  modified_base 5: mod_base = OTHER; note = bicyclic nucleic acid (BNA)
  modified_base 14: mod_base = OTHER; note = bicyclic nucleic acid (BNA)
  modified_base 21..22: mod_base = OTHER; note = bicyclic nucleic acid (BNA)
  source 1..22: mol_type = other RNA
tcaaggaagatggcatttctag

SEQ ID NO: 14932 - RNA, 22 nt, synthetic construct
  misc_feature 1..22: note = Description of Artificial Sequence: Synthetic Antisense oligonucleotide
  modified_base 2: mod_base = OTHER; note = 5-methyl
  modified_base 14: mod_base = OTHER; note = 5-methyl
  modified_base 19: mod_base = OTHER; note = 5-methyl
  modified_base 2: mod_base = OTHER; note = bicyclic nucleic acid (BNA)
  modified_base 6: mod_base = OTHER; note = bicyclic nucleic acid (BNA)
  modified_base 21..22: mod_base = OTHER; note = bicyclic nucleic acid (BNA)
  source 1..22: mol_type = other RNA
tcaaggaagatggcatttctag

SEQ ID NO: 14933 - RNA, 22 nt, synthetic construct
  misc_feature 1..22: note = Description of Artificial Sequence: Synthetic Antisense oligonucleotide
  modified_base 2: mod_base = OTHER; note = 5-methyl
  modified_base 14: mod_base = OTHER; note = 5-methyl
  modified_base 19: mod_base = OTHER; note = 5-methyl
  modified_base 12: mod_base = OTHER; note = bicyclic nucleic acid (BNA)
  modified_base 19: mod_base = OTHER; note = bicyclic nucleic acid (BNA)
  modified_base 21..22: mod_base = OTHER; note = bicyclic nucleic acid (BNA)
  source 1..22: mol_type = other RNA
tcaaggaagatggcatttctag

SEQ ID NO: 14934 - RNA, 22 nt, synthetic construct
  misc_feature 1..22: note = Description of Artificial Sequence: Synthetic Antisense oligonucleotide
  modified_base 2: mod_base = OTHER; note = 5-methyl
  modified_base 14: mod_base = OTHER; note = 5-methyl
  modified_base 19: mod_base = OTHER; note = 5-methyl
  modified_base 12: mod_base = OTHER; note = bicyclic nucleic acid (BNA)
  modified_base 14: mod_base = OTHER; note = bicyclic nucleic acid (BNA)
  modified_base 21..22: mod_base = OTHER; note = bicyclic nucleic acid (BNA)
  source 1..22: mol_type = other RNA
tcaaggaagatggcatttctag

SEQ ID NO: 14935 - RNA, 22 nt, synthetic construct
  misc_feature 1..22: note = Description of Artificial Sequence: Synthetic Antisense oligonucleotide
  modified_base 2: mod_base = OTHER; note = 5-methyl
  modified_base 14: mod_base = OTHER; note = 5-methyl
  modified_base 19: mod_base = OTHER; note = 5-methyl
  modified_base 6: mod_base = OTHER; note = bicyclic nucleic acid (BNA)
  modified_base 12: mod_base = OTHER; note = bicyclic nucleic acid (BNA)
  modified_base 21..22: mod_base = OTHER; note = bicyclic nucleic acid (BNA)
  source 1..22: mol_type = other RNA
tcaaggaagatggcatttctag

SEQ ID NO: 14936 - RNA, 22 nt, synthetic construct
  misc_feature 1..22: note = Description of Artificial Sequence: Synthetic Antisense oligonucleotide
  modified_base 2: mod_base = OTHER; note = 5-methyl
  modified_base 14: mod_base = OTHER; note = 5-methyl
  modified_base 19: mod_base = OTHER; note = 5-methyl
  modified_base 5..6: mod_base = OTHER; note = bicyclic nucleic acid (BNA)
  modified_base 21..22: mod_base = OTHER; note = bicyclic nucleic acid (BNA)
  source 1..22: mol_type = other RNA
tcaaggaagatggcatttctag

SEQ ID NO: 14937 - RNA, 22 nt, synthetic construct
  misc_feature 1..22: note = Description of Artificial Sequence: Synthetic Antisense oligonucleotide
  modified_base 2: mod_base = OTHER; note = 5-methyl
  modified_base 14: mod_base = OTHER; note = 5-methyl
  modified_base 19: mod_base = OTHER; note = 5-methyl
  modified_base 2: mod_base = OTHER; note = bicyclic nucleic acid (BNA)
  modified_base 14: mod_base = OTHER; note = bicyclic nucleic acid (BNA)
  modified_base 21..22: mod_base = OTHER; note = bicyclic nucleic acid (BNA)
  source 1..22: mol_type = other RNA
tcaaggaagatggcatttctag

SEQ ID NO: 14938 - RNA, 22 nt, synthetic construct
  misc_feature 1..22: note = Description of Artificial Sequence: Synthetic Antisense oligonucleotide
  modified_base 2: mod_base = OTHER; note = 5-methyl
  modified_base 14: mod_base = OTHER; note = 5-methyl
  modified_base 19: mod_base = OTHER; note = 5-methyl
  modified_base 9: mod_base = OTHER; note = bicyclic nucleic acid (BNA)
  modified_base 12: mod_base = OTHER; note = bicyclic nucleic acid (BNA)
  modified_base 21..22: mod_base = OTHER; note = bicyclic nucleic acid (BNA)
  source 1..22: mol_type = other RNA
tcaaggaagatggcatttctag

SEQ ID NO: 14939 - RNA, 22 nt, synthetic construct
  misc_feature 1..22: note = Description of Artificial Sequence: Synthetic Antisense oligonucleotide
  modified_base 2: mod_base = OTHER; note = 5-methyl
  modified_base 14: mod_base = OTHER; note = 5-methyl
  modified_base 19: mod_base = OTHER; note = 5-methyl
  modified_base 2: mod_base = OTHER; note = bicyclic nucleic acid (BNA)
  modified_base 5: mod_base = OTHER; note = bicyclic nucleic acid (BNA)
  modified_base 21..22: mod_base = OTHER; note = bicyclic nucleic acid (BNA)
  source 1..22: mol_type = other RNA
tcaaggaagatggcatttctag

SEQ ID NO: 14940 - RNA, 22 nt, synthetic construct
  misc_feature 1..22: note = Description of Artificial Sequence: Synthetic Antisense oligonucleotide
  modified_base 2: mod_base = OTHER; note = 5-methyl
  modified_base 14: mod_base = OTHER; note = 5-methyl
  modified_base 19: mod_base = OTHER; note = 5-methyl
  modified_base 13: mod_base = OTHER; note = bicyclic nucleic acid (BNA)
  modified_base 19: mod_base = OTHER; note = bicyclic nucleic acid (BNA)
  modified_base 21..22: mod_base = OTHER; note = bicyclic nucleic acid (BNA)
  source 1..22: mol_type = other RNA
tcaaggaagatggcatttctag

SEQ ID NO: 14941 - RNA, 22 nt, synthetic construct
  misc_feature 1..22: note = Description of Artificial Sequence: Synthetic Antisense oligonucleotide
  modified_base 2: mod_base = OTHER; note = 5-methyl
  modified_base 14: mod_base = OTHER; note = 5-methyl
  modified_base 19: mod_base = OTHER; note = 5-methyl
  modified_base 12..13: mod_base = OTHER; note = bicyclic nucleic acid (BNA)
  modified_base 21..22: mod_base = OTHER; note = bicyclic nucleic acid (BNA)
  source 1..22: mol_type = other RNA
tcaaggaagatggcatttctag

SEQ ID NO: 14942 - RNA, 22 nt, synthetic construct
  misc_feature 1..22: note = Description of Artificial Sequence: Synthetic Antisense oligonucleotide
  modified_base 2: mod_base = OTHER; note = 5-methyl
  modified_base 14: mod_base = OTHER; note = 5-methyl
  modified_base 19: mod_base = OTHER; note = 5-methyl
  modified_base 5: mod_base = OTHER; note = bicyclic nucleic acid (BNA)
  modified_base 12: mod_base = OTHER; note = bicyclic nucleic acid (BNA)
  modified_base 21..22: mod_base = OTHER; note = bicyclic nucleic acid (BNA)
  source 1..22: mol_type = other RNA
tcaaggaagatggcatttctag

SEQ ID NO: 14943 - RNA, 22 nt, synthetic construct
  misc_feature 1..22: note = Description of Artificial Sequence: Synthetic Antisense oligonucleotide
  modified_base 2: mod_base = OTHER; note = 5-methyl
  modified_base 14: mod_base = OTHER; note = 5-methyl
  modified_base 19: mod_base = OTHER; note = 5-methyl
  modified_base 2: mod_base = OTHER; note = bicyclic nucleic acid (BNA)
  modified_base 13: mod_base = OTHER; note = bicyclic nucleic acid (BNA)
  modified_base 21..22: mod_base = OTHER; note = bicyclic nucleic acid (BNA)
  source 1..22: mol_type = other RNA
tcaaggaagatggcatttctag

SEQ ID NO: 14944 - RNA, 22 nt, synthetic construct
  misc_feature 1..22: note = Description of Artificial Sequence: Synthetic Antisense oligonucleotide
  modified_base 2: mod_base = OTHER; note = 5-methyl
  modified_base 14: mod_base = OTHER; note = 5-methyl
  modified_base 19: mod_base = OTHER; note = 5-methyl
  modified_base 9: mod_base = OTHER; note = bicyclic nucleic acid (BNA)
  modified_base 13: mod_base = OTHER; note = bicyclic nucleic acid (BNA)
  modified_base 21..22: mod_base = OTHER; note = bicyclic nucleic acid (BNA)
  source 1..22: mol_type = other RNA
tcaaggaagatggcatttctag

SEQ ID NO: 14945 - RNA, 22 nt, synthetic construct
  misc_feature 1..22: note = Description of Artificial Sequence: Synthetic Antisense oligonucleotide
  modified_base 2: mod_base = OTHER; note = 5-methyl
  modified_base 14: mod_base = OTHER; note = 5-methyl
  modified_base 19: mod_base = OTHER; note = 5-methyl
  modified_base 2: mod_base = OTHER; note = bicyclic nucleic acid (BNA)
  modified_base 19: mod_base = OTHER; note = bicyclic nucleic acid (BNA)
  modified_base 21..22: mod_base = OTHER; note = bicyclic nucleic acid (BNA)
  source 1..22: mol_type = other RNA
tcaaggaagatggcatttctag

SEQ ID NO: 14946 - RNA, 22 nt, synthetic construct
  misc_feature 1..22: note = Description of Artificial Sequence: Synthetic Antisense oligonucleotide
  modified_base 2: mod_base = OTHER; note = 5-methyl
  modified_base 14: mod_base = OTHER; note = 5-methyl
  modified_base 19: mod_base = OTHER; note = 5-methyl
  modified_base 2: mod_base = OTHER; note = bicyclic nucleic acid (BNA)
  modified_base 9: mod_base = OTHER; note = bicyclic nucleic acid (BNA)
  modified_base 21..22: mod_base = OTHER; note = bicyclic nucleic acid (BNA)
  source 1..22: mol_type = other RNA
tcaaggaagatggcatttctag

SEQ ID NO: 14947 - RNA, 22 nt, synthetic construct
  misc_feature 1..22: note = Description of Artificial Sequence: Synthetic Antisense oligonucleotide
  modified_base 2: mod_base = OTHER; note = 5-methyl
  modified_base 14: mod_base = OTHER; note = 5-methyl
  modified_base 19: mod_base = OTHER; note = 5-methyl
  modified_base 14: mod_base = OTHER; note = bicyclic nucleic acid (BNA)
  modified_base 19: mod_base = OTHER; note = bicyclic nucleic acid (BNA)
  modified_base 21..22: mod_base = OTHER; note = bicyclic nucleic acid (BNA)
  source 1..22: mol_type = other RNA
tcaaggaagatggcatttctag

SEQ ID NO: 14948 - RNA, 22 nt, synthetic construct
  misc_feature 1..22: note = Description of Artificial Sequence: Synthetic Antisense oligonucleotide
  modified_base 2: mod_base = OTHER; note = 5-methyl
  modified_base 14: mod_base = OTHER; note = 5-methyl
  modified_base 19: mod_base = OTHER; note = 5-methyl
  modified_base 9: mod_base = OTHER; note = bicyclic nucleic acid (BNA)
  modified_base 19: mod_base = OTHER; note = bicyclic nucleic acid (BNA)
  modified_base 21..22: mod_base = OTHER; note = bicyclic nucleic acid (BNA)
  source 1..22: mol_type = other RNA
tcaaggaagatggcatttctag

SEQ ID NO: 14949 - DNA, 18 bp, synthetic construct
  misc_feature 1..18: note = Description of Artificial Sequence: Synthetic Antisense oligonucleotide
  modified_base 2: mod_base = OTHER; note = bicyclic nucleic acid (BNA)
  modified_base 17..18: mod_base = OTHER; note = bicyclic nucleic acid (BNA)
  source 1..18: mol_type = other DNA
ggtaagttctgtccaagc

SEQ ID NO: 14950 - DNA, 18 bp, synthetic construct
  misc_feature 1..18: note = Description of Artificial Sequence: Synthetic Antisense oligonucleotide
  modified_base 9: mod_base = OTHER; note = bicyclic nucleic acid (BNA)
  modified_base 17..18: mod_base = OTHER; note = bicyclic nucleic acid (BNA)
  source 1..18: mol_type = other DNA
ggtaagttctgtccaagc

SEQ ID NO: 14951 - DNA, 18 bp, synthetic construct
  misc_feature 1..18: note = Description of Artificial Sequence: Synthetic Antisense oligonucleotide
  modified_base 11: mod_base = OTHER; note = bicyclic nucleic acid (BNA)
  modified_base 17..18: mod_base = OTHER; note = bicyclic nucleic acid (BNA)
  source 1..18: mol_type = other DNA
ggtaagttctgtccaagc

SEQ ID NO: 14952 - DNA, 18 bp, synthetic construct
  misc_feature 1..18: note = Description of Artificial Sequence: Synthetic Antisense oligonucleotide
  modified_base 6: mod_base = OTHER; note = bicyclic nucleic acid (BNA)
  modified_base 17..18: mod_base = OTHER; note = bicyclic nucleic acid (BNA)
  source 1..18: mol_type = other DNA
ggtaagttctgtccaagc

SEQ ID NO: 14953 - DNA, 18 bp, synthetic construct
  misc_feature 1..18: note = Description of Artificial Sequence: Synthetic Antisense oligonucleotide
  modified_base 13: mod_base = OTHER; note = bicyclic nucleic acid (BNA)
  modified_base 17..18: mod_base = OTHER; note = bicyclic nucleic acid (BNA)
  source 1..18: mol_type = other DNA
ggtaagttctgtccaagc

SEQ ID NO: 14954 - DNA, 18 bp, synthetic construct
  misc_feature 1..18: note = Description of Artificial Sequence: Synthetic Antisense oligonucleotide
  modified_base 14: mod_base = OTHER; note = bicyclic nucleic acid (BNA)
  modified_base 17..18: mod_base = OTHER; note = bicyclic nucleic acid (BNA)
  source 1..18: mol_type = other DNA
ggtaagttctgtccaagc

SEQ ID NO: 14955 - DNA, 18 bp, synthetic construct
  misc_feature 1..18: note = Description of Artificial Sequence: Synthetic Antisense oligonucleotide
  modified_base 16..18: mod_base = OTHER; note = bicyclic nucleic acid (BNA)
  source 1..18: mol_type = other DNA
gtaagttctgtccaagcc

SEQ ID NO: 14956 - DNA, 18 bp, synthetic construct
  misc_feature 1..18: note = Description of Artificial Sequence: Synthetic Antisense oligonucleotide
  modified_base 10: mod_base = OTHER; note = bicyclic nucleic acid (BNA)
  modified_base 17..18: mod_base = OTHER; note = bicyclic nucleic acid (BNA)
  source 1..18: mol_type = other DNA
gtaagttctgtccaagcc

SEQ ID NO: 14957 - DNA, 18 bp, synthetic construct
  misc_feature 1..18: note = Description of Artificial Sequence: Synthetic Antisense oligonucleotide
  modified_base 5: mod_base = OTHER; note = bicyclic nucleic acid (BNA)
  modified_base 17..18: mod_base = OTHER; note = bicyclic nucleic acid (BNA)
  source 1..18: mol_type = other DNA
gtaagttctgtccaagcc

SEQ ID NO: 14958 - DNA, 18 bp, synthetic construct
  misc_feature 1..18: note = Description of Artificial Sequence: Synthetic Antisense oligonucleotide
  modified_base 12: mod_base = OTHER; note = bicyclic nucleic acid (BNA)
  modified_base 17..18: mod_base = OTHER; note = bicyclic nucleic acid (BNA)
  source 1..18: mol_type = other DNA
gtaagttctgtccaagcc

SEQ ID NO: 14959 - DNA, 18 bp, synthetic construct
  misc_feature 1..18: note = Description of Artificial Sequence: Synthetic Antisense oligonucleotide
  modified_base 13: mod_base = OTHER; note = bicyclic nucleic acid (BNA)
  modified_base 17..18: mod_base = OTHER; note = bicyclic nucleic acid (BNA)
  source 1..18: mol_type = other DNA
gtaagttctgtccaagcc

SEQ ID NO: 14960 - DNA, 18 bp, synthetic construct
  misc_feature 1..18: note = Description of Artificial Sequence: Synthetic Antisense oligonucleotide
  modified_base 8: mod_base = OTHER; note = bicyclic nucleic acid (BNA)
  modified_base 17..18: mod_base = OTHER; note = bicyclic nucleic acid (BNA)
  source 1..18: mol_type = other DNA
gtaagttctgtccaagcc

SEQ ID NO: 14961 - DNA, 18 bp, synthetic construct
  misc_feature 1..18: note = Description of Artificial Sequence: Synthetic Antisense oligonucleotide
  modified_base 2: mod_base = OTHER; note = bicyclic nucleic acid (BNA)
  modified_base 17..18: mod_base = OTHER; note = bicyclic nucleic acid (BNA)
  source 1..18: mol_type = other DNA
agtcggtaagttctgtcc

SEQ ID NO: 14962 - DNA, 18 bp, synthetic construct
  misc_feature 1..18: note = Description of Artificial Sequence: Synthetic Antisense oligonucleotide
  modified_base 4: mod_base = OTHER; note = bicyclic nucleic acid (BNA)
  modified_base 17..18: mod_base = OTHER; note = bicyclic nucleic acid (BNA)
  source 1..18: mol_type = other DNA
agtcggtaagttctgtcc

SEQ ID NO: 14963 - DNA, 18 bp, synthetic construct
  misc_feature 1..18: note = Description of Artificial Sequence: Synthetic Antisense oligonucleotide
  modified_base 10: mod_base = OTHER; note = bicyclic nucleic acid (BNA)
  modified_base 17..18: mod_base = OTHER; note = bicyclic nucleic acid (BNA)
  source 1..18: mol_type = other DNA
agtcggtaagttctgtcc

SEQ ID NO: 14964 - DNA, 18 bp, synthetic construct
  misc_feature 1..18: note = Description of Artificial Sequence: Synthetic Antisense oligonucleotide
  modified_base 5: mod_base = OTHER; note = bicyclic nucleic acid (BNA)
  modified_base 17..18: mod_base = OTHER; note = bicyclic nucleic acid (BNA)
  source 1..18: mol_type = other DNA
agtcggtaagttctgtcc

SEQ ID NO: 14965 - DNA, 18 bp, synthetic construct
  misc_feature 1..18: note = Description of Artificial Sequence: Synthetic Antisense oligonucleotide
  modified_base 6: mod_base = OTHER; note = bicyclic nucleic acid (BNA)
  modified_base 17..18: mod_base = OTHER; note = bicyclic nucleic acid (BNA)
  source 1..18: mol_type = other DNA
agtcggtaagttctgtcc

SEQ ID NO: 14966 - DNA, 18 bp, synthetic construct
  misc_feature 1..18: note = Description of Artificial Sequence: Synthetic Antisense oligonucleotide
  modified_base 13: mod_base = OTHER; note = bicyclic nucleic acid (BNA)
  modified_base 17..18: mod_base = OTHER; note = bicyclic nucleic acid (BNA)
  source 1..18: mol_type = other DNA
agtcggtaagttctgtcc

SEQ ID NO: 14967 - DNA, 18 bp, synthetic construct
  misc_feature 1..18: note = Description of Artificial Sequence: Synthetic Antisense oligonucleotide
  modified_base 15: mod_base = OTHER; note = bicyclic nucleic acid (BNA)
  modified_base 17..18: mod_base = OTHER; note = bicyclic nucleic acid (BNA)
  source 1..18: mol_type = other DNA
agtcggtaagttctgtcc

SEQ ID NO: 14968 - DNA, 18 bp, synthetic construct
  misc_feature 1..18: note = Description of Artificial Sequence: Synthetic Antisense oligonucleotide
  modified_base 3: mod_base = OTHER; note = bicyclic nucleic acid (BNA)
  modified_base 17..18: mod_base = OTHER; note = bicyclic nucleic acid (BNA)
  source 1..18: mol_type = other DNA
ctgtccaagcccggttga

SEQ ID NO: 14969 - DNA, 18 bp, synthetic construct
  misc_feature 1..18: note = Description of Artificial Sequence: Synthetic Antisense oligonucleotide
  modified_base 9: mod_base = OTHER; note = bicyclic nucleic acid (BNA)
  modified_base 17..18: mod_base = OTHER; note = bicyclic nucleic acid (BNA)
  source 1..18: mol_type = other DNA
ctgtccaagcccggttga

SEQ ID NO: 14970 - DNA, 18 bp, synthetic construct
  misc_feature 1..18: note = Description of Artificial Sequence: Synthetic Antisense oligonucleotide
  modified_base 10: mod_base = OTHER; note = bicyclic nucleic acid (BNA)
  modified_base 17..18: mod_base = OTHER; note = bicyclic nucleic acid (BNA)
  source 1..18: mol_type = other DNA
ctgtccaagcccggttga

SEQ ID NO: 14971 - DNA, 18 bp, synthetic construct
  misc_feature 1..18: note = Description of Artificial Sequence: Synthetic Antisense oligonucleotide
  modified_base 5: mod_base = OTHER; note = bicyclic nucleic acid (BNA)
  modified_base 17..18: mod_base = OTHER; note = bicyclic nucleic acid (BNA)
  source 1..18: mol_type = other DNA
ctgtccaagcccggttga

SEQ ID NO: 14972 - DNA, 18 bp, synthetic construct
  misc_feature 1..18: note = Description of Artificial Sequence: Synthetic Antisense oligonucleotide
  modified_base 11: mod_base = OTHER; note = bicyclic nucleic acid (BNA)
  modified_base 17..18: mod_base = OTHER; note = bicyclic nucleic acid (BNA)
  source 1..18: mol_type = other DNA
ctgtccaagcccggttga

SEQ ID NO: 14973 - DNA, 18 bp, synthetic construct
  misc_feature 1..18: note = Description of Artificial Sequence: Synthetic Antisense oligonucleotide
  modified_base 6: mod_base = OTHER; note = bicyclic nucleic acid (BNA)
  modified_base 17..18: mod_base = OTHER; note = bicyclic nucleic acid (BNA)
  source 1..18: mol_type = other DNA
ctgtccaagcccggttga

SEQ ID NO: 14974 - DNA, 18 bp, synthetic construct
  misc_feature 1..18: note = Description of Artificial Sequence: Synthetic Antisense oligonucleotide
  modified_base 12: mod_base = OTHER; note = bicyclic nucleic acid (BNA)
  modified_base 17..18: mod_base = OTHER; note = bicyclic nucleic acid (BNA)
  source 1..18: mol_type = other DNA
ctgtccaagcccggttga

SEQ ID NO: 14975 - DNA, 18 bp, synthetic construct
  misc_feature 1..18: note = Description of Artificial Sequence: Synthetic Antisense oligonucleotide
  modified_base 13: mod_base = OTHER; note = bicyclic nucleic acid (BNA)
  modified_base 17..18: mod_base = OTHER; note = bicyclic nucleic acid (BNA)
  source 1..18: mol_type = other DNA
ctgtccaagcccggttga

SEQ ID NO: 14976 - DNA, 18 bp, synthetic construct
  misc_feature 1..18: note = Description of Artificial Sequence: Synthetic Antisense oligonucleotide
  modified_base 14: mod_base = OTHER; note = bicyclic nucleic acid (BNA)
  modified_base 17..18: mod_base = OTHER; note = bicyclic nucleic acid (BNA)
  source 1..18: mol_type = other DNA
ctgtccaagcccggttga

SEQ ID NO: 14977 - DNA, 18 bp, synthetic construct
  misc_feature 1..18: note = Description of Artificial Sequence: Synthetic Antisense oligonucleotide
  modified_base 6: mod_base = OTHER; note = bicyclic nucleic acid (BNA)
  modified_base 11: mod_base = OTHER; note = bicyclic nucleic acid (BNA)
  modified_base 17..18: mod_base = OTHER; note = bicyclic nucleic acid (BNA)
  source 1..18: mol_type = other DNA
ggtaagttctgtccaagc

SEQ ID NO: 14978 - DNA, 18 bp, synthetic construct
  misc_feature 1..18: note = Description of Artificial Sequence: Synthetic Antisense oligonucleotide
  modified_base 9: mod_base = OTHER; note = bicyclic nucleic acid (BNA)
  modified_base 14: mod_base = OTHER; note = bicyclic nucleic acid (BNA)
  modified_base 17..18: mod_base = OTHER; note = bicyclic nucleic acid (BNA)
  source 1..18: mol_type = other DNA
ggtaagttctgtccaagc

SEQ ID NO: 14979 - DNA, 18 bp, synthetic construct
  misc_feature 1..18: note = Description of Artificial Sequence: Synthetic Antisense oligonucleotide
  modified_base 2: mod_base = OTHER; note = bicyclic nucleic acid (BNA)
  modified_base 13: mod_base = OTHER; note = bicyclic nucleic acid (BNA)
  modified_base 17..18: mod_base = OTHER; note = bicyclic nucleic acid (BNA)
  source 1..18: mol_type = other DNA
ggtaagttctgtccaagc

SEQ ID NO: 14980 - DNA, 18 bp, synthetic construct
  misc_feature 1..18: note = Description of Artificial Sequence: Synthetic Antisense oligonucleotide
  modified_base 9: mod_base = OTHER; note = bicyclic nucleic acid (BNA)
  modified_base 13: mod_base = OTHER; note = bicyclic nucleic acid (BNA)
  modified_base 17..18: mod_base = OTHER; note = bicyclic nucleic acid (BNA)
  source 1..18: mol_type = other DNA
ggtaagttctgtccaagc

SEQ ID NO: 14981 - DNA, 18 bp, synthetic construct
  misc_feature 1..18: note = Description of Artificial Sequence: Synthetic Antisense oligonucleotide
  modified_base 13..14: mod_base = OTHER; note = bicyclic nucleic acid (BNA)
  modified_base 17..18: mod_base = OTHER; note = bicyclic nucleic acid (BNA)
  source 1..18: mol_type = other DNA
ggtaagttctgtccaagc

SEQ ID NO: 14982 - DNA, 18 bp, synthetic construct
  misc_feature 1..18: note = Description of Artificial Sequence: Synthetic Antisense oligonucleotide
  modified_base 2: mod_base = OTHER; note = bicyclic nucleic acid (BNA)
  modified_base 14: mod_base = OTHER; note = bicyclic nucleic acid (BNA)
  modified_base 17..18: mod_base = OTHER; note = bicyclic nucleic acid (BNA)
  source 1..18: mol_type = other DNA
ggtaagttctgtccaagc

SEQ ID NO: 14983 - DNA, 18 bp, synthetic construct
  misc_feature 1..18: note = Description of Artificial Sequence: Synthetic Antisense oligonucleotide
  modified_base 11: mod_base = OTHER; note = bicyclic nucleic acid (BNA)
  modified_base 14: mod_base = OTHER; note = bicyclic nucleic acid (BNA)
  modified_base 17..18: mod_base = OTHER; note = bicyclic nucleic acid (BNA)
  source 1..18: mol_type = other DNA
ggtaagttctgtccaagc

SEQ ID NO: 14984 - DNA, 18 bp, synthetic construct
  misc_feature 1..18: note = Description of Artificial Sequence: Synthetic Antisense oligonucleotide
  modified_base 6: mod_base = OTHER; note = bicyclic nucleic acid (BNA)
  modified_base 13: mod_base = OTHER; note = bicyclic nucleic acid (BNA)
  modified_base 17..18: mod_base = OTHER; note = bicyclic nucleic acid (BNA)
  source 1..18: mol_type = other DNA
ggtaagttctgtccaagc

SEQ ID NO: 14985 - DNA, 18 bp, synthetic construct
  misc_feature 1..18: note = Description of Artificial Sequence: Synthetic Antisense oligonucleotide
  modified_base 6: mod_base = OTHER; note = bicyclic nucleic acid (BNA)
  modified_base 14: mod_base = OTHER; note = bicyclic nucleic acid (BNA)
  modified_base 17..18: mod_base = OTHER; note = bicyclic nucleic acid (BNA)
  source 1..18: mol_type = other DNA
ggtaagttctgtccaagc

SEQ ID NO: 14986 - DNA, 18 bp, synthetic construct
  misc_feature 1..18: note = Description of Artificial Sequence: Synthetic Antisense oligonucleotide
  modified_base 9: mod_base = OTHER; note = bicyclic nucleic acid (BNA)
  modified_base 11: mod_base = OTHER; note = bicyclic nucleic acid (BNA)
  modified_base 17..18: mod_base = OTHER; note = bicyclic nucleic acid (BNA)
  source 1..18: mol_type = other DNA
ggtaagttctgtccaagc

SEQ ID NO: 14987 - DNA, 18 bp, synthetic construct
  misc_feature 1..18: note = Description of Artificial Sequence: Synthetic Antisense oligonucleotide
  modified_base 11: mod_base = OTHER; note = bicyclic nucleic acid (BNA)
  modified_base 13: mod_base = OTHER; note = bicyclic nucleic acid (BNA)
  modified_base 17..18: mod_base = OTHER; note = bicyclic nucleic acid (BNA)
  source 1..18: mol_type = other DNA
ggtaagttctgtccaagc

SEQ ID NO: 14988 - DNA, 18 bp, synthetic construct
  misc_feature 1..18: note = Description of Artificial Sequence: Synthetic Antisense oligonucleotide
  modified_base 2: mod_base = OTHER; note = bicyclic nucleic acid (BNA)
  modified_base 6: mod_base = OTHER; note = bicyclic nucleic acid (BNA)
  modified_base 17..18: mod_base = OTHER; note = bicyclic nucleic acid (BNA)
  source 1..18: mol_type = other DNA
ggtaagttctgtccaagc

SEQ ID NO: 14989 - DNA, 18 bp, synthetic construct
  misc_feature 1..18: note = Description of Artificial Sequence: Synthetic Antisense oligonucleotide
  modified_base 2: mod_base = OTHER; note = bicyclic nucleic acid (BNA)
  modified_base 9: mod_base = OTHER; note = bicyclic nucleic acid (BNA)
  modified_base 17..18: mod_base = OTHER; note = bicyclic nucleic acid (BNA)
  source 1..18: mol_type = other DNA
ggtaagttctgtccaagc

SEQ ID NO: 14990 - DNA, 18 bp, synthetic construct
  misc_feature 1..18: note = Description of Artificial Sequence: Synthetic Antisense oligonucleotide
  modified_base 2: mod_base = OTHER; note = bicyclic nucleic acid (BNA)
  modified_base 11: mod_base = OTHER; note = bicyclic nucleic acid (BNA)
  modified_base 17..18: mod_base = OTHER; note = bicyclic nucleic acid (BNA)
  source 1..18: mol_type = other DNA
ggtaagttctgtccaagc

SEQ ID NO: 14991 - DNA, 18 bp, synthetic construct
  misc_feature 1..18: note = Description of Artificial Sequence: Synthetic Antisense oligonucleotide
  modified_base 6: mod_base = OTHER; note = bicyclic nucleic acid (BNA)
  modified_base 9: mod_base = OTHER; note = bicyclic nucleic acid (BNA)
  modified_base 17..18: mod_base = OTHER; note = bicyclic nucleic acid (BNA)
  source 1..18: mol_type = other DNA
ggtaagttctgtccaagc

SEQ ID NO: 14992 - DNA, 18 bp, synthetic construct
  misc_feature 1..18: note = Description of Artificial Sequence: Synthetic Antisense oligonucleotide
  modified_base 5: mod_base = OTHER; note = bicyclic nucleic acid (BNA)
  modified_base 8: mod_base = OTHER; note = bicyclic nucleic acid (BNA)
  modified_base 17..18: mod_base = OTHER; note = bicyclic nucleic acid (BNA)
  source 1..18: mol_type = other DNA
gtaagttctgtccaagcc

SEQ ID NO: 14993 - DNA, 18 bp, synthetic construct
  misc_feature 1..18: note = Description of Artificial Sequence: Synthetic Antisense oligonucleotide
  modified_base 13: mod_base = OTHER; note = bicyclic nucleic acid (BNA)
  modified_base 16..18: mod_base = OTHER; note = bicyclic nucleic acid (BNA)
  source 1..18: mol_type = other DNA
gtaagttctgtccaagcc

SEQ ID NO: 14994 - DNA, 18 bp, synthetic construct
  misc_feature 1..18: note = Description of Artificial Sequence: Synthetic Antisense oligonucleotide
  modified_base 5: mod_base = OTHER; note = bicyclic nucleic acid (BNA)
  modified_base 10: mod_base = OTHER; note = bicyclic nucleic acid (BNA)
  modified_base 17..18: mod_base = OTHER; note = bicyclic nucleic acid (BNA)
  source 1..18: mol_type = other DNA
gtaagttctgtccaagcc

SEQ ID NO: 14995 - DNA, 18 bp, synthetic construct
  misc_feature 1..18: note = Description of Artificial Sequence: Synthetic Antisense oligonucleotide
  modified_base 8: mod_base = OTHER; note = bicyclic nucleic acid (BNA)
  modified_base 16..18: mod_base = OTHER; note = bicyclic nucleic acid (BNA)
  source 1..18: mol_type = other DNA
gtaagttctgtccaagcc

SEQ ID NO: 14996 - DNA, 18 bp, synthetic construct
  misc_feature 1..18: note = Description of Artificial Sequence: Synthetic Antisense oligonucleotide
  modified_base 10: mod_base = OTHER; note = bicyclic nucleic acid (BNA)
  modified_base 16..18: mod_base = OTHER; note = bicyclic nucleic acid (BNA)
  source 1..18: mol_type = other DNA
gtaagttctgtccaagcc

SEQ ID NO: 14997 - DNA, 18 bp, synthetic construct
  misc_feature 1..18: note = Description of Artificial Sequence: Synthetic Antisense oligonucleotide
  modified_base 8: mod_base = OTHER; note = bicyclic nucleic acid (BNA)
  modified_base 13: mod_base = OTHER; note = bicyclic nucleic acid (BNA)
  modified_base 17..18: mod_base = OTHER; note = bicyclic nucleic acid (BNA)
  source 1..18: mol_type = other DNA
gtaagttctgtccaagcc

SEQ ID NO: 14998 - DNA, 18 bp, synthetic construct
  misc_feature 1..18: note = Description of Artificial Sequence: Synthetic Antisense oligonucleotide
  modified_base 5: mod_base = OTHER; note = bicyclic nucleic acid (BNA)
  modified_base 16..18: mod_base = OTHER; note = bicyclic nucleic acid (BNA)
  source 1..18: mol_type = other DNA
gtaagttctgtccaagcc

SEQ ID NO: 14999 - DNA, 18 bp, synthetic construct
  misc_feature 1..18: note = Description of Artificial Sequence: Synthetic Antisense oligonucleotide
  modified_base 10: mod_base = OTHER; note = bicyclic nucleic acid (BNA)
  modified_base 13: mod_base = OTHER; note = bicyclic nucleic acid (BNA)
  modified_base 17..18: mod_base = OTHER; note = bicyclic nucleic acid (BNA)
  source 1..18: mol_type = other DNA
gtaagttctgtccaagcc

SEQ ID NO: 15000 - DNA, 18 bp, synthetic construct
  misc_feature 1..18: note = Description of Artificial Sequence: Synthetic Antisense oligonucleotide
  modified_base 5: mod_base = OTHER; note = bicyclic nucleic acid (BNA)
  modified_base 13: mod_base = OTHER; note = bicyclic nucleic acid (BNA)
  modified_base 17..18: mod_base = OTHER; note = bicyclic nucleic acid (BNA)
  source 1..18: mol_type = other DNA
gtaagttctgtccaagcc

SEQ ID NO: 15001 - DNA, 18 bp, synthetic construct
  misc_feature 1..18: note = Description of Artificial Sequence: Synthetic Antisense oligonucleotide
  modified_base 10: mod_base = OTHER; note = bicyclic nucleic acid (BNA)
  modified_base 12: mod_base = OTHER; note = bicyclic nucleic acid (BNA)
  modified_base 17..18: mod_base = OTHER; note = bicyclic nucleic acid (BNA)
  source 1..18: mol_type = other DNA
gtaagttctgtccaagcc

SEQ ID NO: 15002 - DNA, 18 bp, synthetic construct
  misc_feature 1..18: note = Description of Artificial Sequence: Synthetic Antisense oligonucleotide
  modified_base 8: mod_base = OTHER; note = bicyclic nucleic acid (BNA)
  modified_base 12: mod_base = OTHER; note = bicyclic nucleic acid (BNA)
  modified_base 17..18: mod_base = OTHER; note = bicyclic nucleic acid (BNA)
  source 1..18: mol_type = other DNA
gtaagttctgtccaagcc

SEQ ID NO: 15003 - DNA, 18 bp, synthetic construct
  misc_feature 1..18: note = Description of Artificial Sequence: Synthetic Antisense oligonucleotide
  modified_base 12: mod_base = OTHER; note = bicyclic nucleic acid (BNA)
  modified_base 16..18: mod_base = OTHER; note = bicyclic nucleic acid (BNA)
  source 1..18: mol_type = other DNA
gtaagttctgtccaagcc

SEQ ID NO: 15004 - DNA, 18 bp, synthetic construct
  misc_feature 1..18: note = Description of Artificial Sequence: Synthetic Antisense oligonucleotide
  modified_base 12..13: mod_base = OTHER; note = bicyclic nucleic acid (BNA)
  modified_base 17..18: mod_base = OTHER; note = bicyclic nucleic acid (BNA)
  source 1..18: mol_type = other DNA
gtaagttctgtccaagcc

SEQ ID NO: 15005 - DNA, 18 bp, synthetic construct
  misc_feature 1..18: note = Description of Artificial Sequence: Synthetic Antisense oligonucleotide
  modified_base 5: mod_base = OTHER; note = bicyclic nucleic acid (BNA)
  modified_base 12: mod_base = OTHER; note = bicyclic nucleic acid (BNA)
  modified_base 17..18: mod_base = OTHER; note = bicyclic nucleic acid (BNA)
  source 1..18: mol_type = other DNA
gtaagttctgtccaagcc

SEQ ID NO: 15006 - DNA, 18 bp, synthetic construct
  misc_feature 1..18: note = Description of Artificial Sequence: Synthetic Antisense oligonucleotide
  modified_base 8: mod_base = OTHER; note = bicyclic nucleic acid (BNA)
  modified_base 10: mod_base = OTHER; note = bicyclic nucleic acid (BNA)
  modified_base 17..18: mod_base = OTHER; note = bicyclic nucleic acid (BNA)
  source 1..18: mol_type = other DNA
gtaagttctgtccaagcc

SEQ ID NO: 15007 - DNA, 18 bp, synthetic construct
  misc_feature 1..18: note = Description of Artificial Sequence: Synthetic Antisense oligonucleotide
  modified_base 6: mod_base = OTHER; note = bicyclic nucleic acid (BNA)
  modified_base 10: mod_base = OTHER; note = bicyclic nucleic acid (BNA)
  modified_base 17..18: mod_base = OTHER; note = bicyclic nucleic acid (BNA)
  source 1..18: mol_type = other DNA
agtcggtaagttctgtcc

SEQ ID NO: 15008 - DNA, 18 bp, synthetic construct
  misc_feature 1..18: note = Description of Artificial Sequence: Synthetic Antisense oligonucleotide
  modified_base 2: mod_base = OTHER; note = bicyclic nucleic acid (BNA)
  modified_base 4: mod_base = OTHER; note = bicyclic nucleic acid (BNA)
  modified_base 17..18: mod_base = OTHER; note = bicyclic nucleic acid (BNA)
  source 1..18: mol_type = other DNA
agtcggtaagttctgtcc

SEQ ID NO: 15009 - DNA, 18 bp, synthetic construct
  misc_feature 1..18: note = Description of Artificial Sequence: Synthetic Antisense oligonucleotide
  modified_base 5: mod_base = OTHER; note = bicyclic nucleic acid (BNA)
  modified_base 13: mod_base = OTHER; note = bicyclic nucleic acid (BNA)
  modified_base 17..18: mod_base = OTHER; note = bicyclic nucleic acid (BNA)
  source 1..18: mol_type = other DNA
agtcggtaagttctgtcc

SEQ ID NO: 15010 - DNA, 18 bp, synthetic construct
  misc_feature 1..18: note = Description of Artificial Sequence: Synthetic Antisense oligonucleotide
  modified_base 4: mod_base = OTHER; note = bicyclic nucleic acid (BNA)
  modified_base 15: mod_base = OTHER; note = bicyclic nucleic acid (BNA)
  modified_base 17..18: mod_base = OTHER; note = bicyclic nucleic acid (BNA)
  source 1..18: mol_type = other DNA
agtcggtaagttctgtcc

SEQ ID NO: 15011 - DNA, 18 bp, synthetic construct
  misc_feature 1..18: note = Description of Artificial Sequence: Synthetic Antisense oligonucleotide
  modified_base 5: mod_base = OTHER; note = bicyclic nucleic acid (BNA)
  modified_base 10: mod_base = OTHER; note = bicyclic nucleic acid (BNA)
  modified_base 17..18: mod_base = OTHER; note = bicyclic nucleic acid (BNA)
  source 1..18: mol_type = other DNA
agtcggtaagttctgtcc

SEQ ID NO: 15012 - DNA, 18 bp, synthetic construct
  misc_feature 1..18: note = Description of Artificial Sequence: Synthetic Antisense oligonucleotide
  modified_base 6: mod_base = OTHER; note = bicyclic nucleic acid (BNA)
  modified_base 13: mod_base = OTHER; note = bicyclic nucleic acid (BNA)
  modified_base 17..18: mod_base = OTHER; note = bicyclic nucleic acid (BNA)
  source 1..18: mol_type = other DNA
agtcggtaagttctgtcc

SEQ ID NO: 15013 - DNA, 18 bp, synthetic construct
  misc_feature 1..18: note = Description of Artificial Sequence: Synthetic Antisense oligonucleotide
  modified_base 2: mod_base = OTHER; note = bicyclic nucleic acid (BNA)
  modified_base 15: mod_base = OTHER; note = bicyclic nucleic acid (BNA)
  modified_base 17..18: mod_base = OTHER; note = bicyclic nucleic acid (BNA)
  source 1..18: mol_type = other DNA
agtcggtaagttctgtcc

SEQ ID NO: 15014 - DNA, 18 bp, synthetic construct
  misc_feature 1..18: note = Description of Artificial Sequence: Synthetic Antisense oligonucleotide
  modified_base 2: mod_base = OTHER; note = bicyclic nucleic acid (BNA)
  modified_base 6: mod_base = OTHER; note = bicyclic nucleic acid (BNA)
  modified_base 17..18: mod_base = OTHER; note = bicyclic nucleic acid (BNA)
  source 1..18: mol_type = other DNA
agtcggtaagttctgtcc

SEQ ID NO: 15015 - DNA, 18 bp, synthetic construct
  misc_feature 1..18: note = Description of Artificial Sequence: Synthetic Antisense oligonucleotide
  modified_base 10: mod_base = OTHER; note = bicyclic nucleic acid (BNA)
  modified_base 15: mod_base = OTHER; note = bicyclic nucleic acid (BNA)
  modified_base 17..18: mod_base = OTHER; note = bicyclic nucleic acid (BNA)
  source 1..18: mol_type = other DNA
agtcggtaagttctgtcc

SEQ ID NO: 15016 - DNA, 18 bp, synthetic construct
  misc_feature 1..18: note = Description of Artificial Sequence: Synthetic Antisense oligonucleotide
  modified_base 13: mod_base = OTHER; note = bicyclic nucleic acid (BNA)
  modified_base 15: mod_base = OTHER; note = bicyclic nucleic acid (BNA)
  modified_base 17..18: mod_base = OTHER; note = bicyclic nucleic acid (BNA)
  source 1..18: mol_type = other DNA
agtcggtaagttctgtcc

SEQ ID NO: 15017 - DNA, 18 bp, synthetic construct
  misc_feature 1..18: note = Description of Artificial Sequence: Synthetic Antisense oligonucleotide
  modified_base 5..6: mod_base = OTHER; note = bicyclic nucleic acid (BNA)
  modified_base 17..18: mod_base = OTHER; note = bicyclic nucleic acid (BNA)
  source 1..18: mol_type = other DNA
agtcggtaagttctgtcc

SEQ ID NO: 15018 - DNA, 18 bp, synthetic construct
  misc_feature 1..18: note = Description of Artificial Sequence: Synthetic Antisense oligonucleotide
  modified_base 5: mod_base = OTHER; note = bicyclic nucleic acid (BNA)
  modified_base 15: mod_base = OTHER; note = bicyclic nucleic acid (BNA)
  modified_base 17..18: mod_base = OTHER; note = bicyclic nucleic acid (BNA)
  source 1..18: mol_type = other DNA
agtcggtaagttctgtcc

SEQ ID NO: 15019 - DNA, 18 bp, synthetic construct
  misc_feature 1..18: note = Description of Artificial Sequence: Synthetic Antisense oligonucleotide
  modified_base 2: mod_base = OTHER; note = bicyclic nucleic acid (BNA)
  modified_base 5: mod_base = OTHER; note = bicyclic nucleic acid (BNA)
  modified_base 17..18: mod_base = OTHER; note = bicyclic nucleic acid (BNA)
  source 1..18: mol_type = other DNA
agtcggtaagttctgtcc

SEQ ID NO: 15020 - DNA, 18 bp, synthetic construct
  misc_feature 1..18: note = Description of Artificial Sequence: Synthetic Antisense oligonucleotide
  modified_base 4: mod_base = OTHER; note = bicyclic nucleic acid (BNA)
  modified_base 10: mod_base = OTHER; note = bicyclic nucleic acid (BNA)
  modified_base 17..18: mod_base = OTHER; note = bicyclic nucleic acid (BNA)
  source 1..18: mol_type = other DNA
agtcggtaagttctgtcc

SEQ ID NO: 15021 - DNA, 18 bp, synthetic construct
  misc_feature 1..18: note = Description of Artificial Sequence: Synthetic Antisense oligonucleotide
  modified_base 2: mod_base = OTHER; note = bicyclic nucleic acid (BNA)
  modified_base 10: mod_base = OTHER; note = bicyclic nucleic acid (BNA)
  modified_base 17..18: mod_base = OTHER; note = bicyclic nucleic acid (BNA)
  source 1..18: mol_type = other DNA
agtcggtaagttctgtcc

SEQ ID NO: 15022 - DNA, 18 bp, synthetic construct
  misc_feature 1..18: note = Description of Artificial Sequence: Synthetic Antisense oligonucleotide
  modified_base 4: mod_base = OTHER; note = bicyclic nucleic acid (BNA)
  modified_base 6: mod_base = OTHER; note = bicyclic nucleic acid (BNA)
  modified_base 17..18: mod_base = OTHER; note = bicyclic nucleic acid (BNA)
  source 1..18: mol_type = other DNA
agtcggtaagttctgtcc

SEQ ID NO: 15023 - DNA, 18 bp, synthetic construct
  misc_feature 1..18: note = Description of Artificial Sequence: Synthetic Antisense oligonucleotide
  modified_base 4: mod_base = OTHER; note = bicyclic nucleic acid (BNA)
  modified_base 13: mod_base = OTHER; note = bicyclic nucleic acid (BNA)
  modified_base 17..18: mod_base = OTHER; note = bicyclic nucleic acid (BNA)
  source 1..18: mol_type = other DNA
agtcggtaagttctgtcc

SEQ ID NO: 15024 - DNA, 18 bp, synthetic construct
  misc_feature 1..18: note = Description of Artificial Sequence: Synthetic Antisense oligonucleotide
  modified_base 2: mod_base = OTHER; note = bicyclic nucleic acid (BNA)
  modified_base 13: mod_base = OTHER; note = bicyclic nucleic acid (BNA)
  modified_base 17..18: mod_base = OTHER; note = bicyclic nucleic acid (BNA)
  source 1..18: mol_type = other DNA
agtcggtaagttctgtcc

SEQ ID NO: 15025 - DNA, 18 bp, synthetic construct
  misc_feature 1..18: note = Description of Artificial Sequence: Synthetic Antisense oligonucleotide
  modified_base 6: mod_base = OTHER; note = bicyclic nucleic acid (BNA)
  modified_base 15: mod_base = OTHER; note = bicyclic nucleic acid (BNA)
  modified_base 17..18: mod_base = OTHER; note = bicyclic nucleic acid (BNA)
  source 1..18: mol_type = other DNA
agtcggtaagttctgtcc

SEQ ID NO: 15026 - DNA, 18 bp, synthetic construct
  misc_feature 1..18: note = Description of Artificial Sequence: Synthetic Antisense oligonucleotide
  modified_base 4..5: mod_base = OTHER; note = bicyclic nucleic acid (BNA)
  modified_base 17..18: mod_base = OTHER; note = bicyclic nucleic acid (BNA)
  source 1..18: mol_type = other DNA
agtcggtaagttctgtcc

SEQ ID NO: 15027 - DNA, 18 bp, synthetic construct
  misc_feature 1..18: note = Description of Artificial Sequence: Synthetic Antisense oligonucleotide
  modified_base 10: mod_base = OTHER; note = bicyclic nucleic acid (BNA)
  modified_base 13: mod_base = OTHER; note = bicyclic nucleic acid (BNA)
  modified_base 17..18: mod_base = OTHER; note = bicyclic nucleic acid (BNA)
  source 1..18: mol_type = other DNA
agtcggtaagttctgtcc

SEQ ID NO: 15028 - DNA, 18 bp, synthetic construct
  misc_feature 1..18: note = Description of Artificial Sequence: Synthetic Antisense oligonucleotide
  modified_base 6: mod_base = OTHER; note = bicyclic nucleic acid (BNA)
  modified_base 10: mod_base = OTHER; note = bicyclic nucleic acid (BNA)
  modified_base 17..18: mod_base = OTHER; note = bicyclic nucleic acid (BNA)
  source 1..18: mol_type = other DNA
ctgtccaagcccggttga

SEQ ID NO: 15029 - DNA, 18 bp, synthetic construct
  misc_feature 1..18: note = Description of Artificial Sequence: Synthetic Antisense oligonucleotide
  modified_base 9: mod_base = OTHER; note = bicyclic nucleic acid (BNA)
  modified_base 14: mod_base = OTHER; note = bicyclic nucleic acid (BNA)
  modified_base 17..18: mod_base = OTHER; note = bicyclic nucleic acid (BNA)
  source 1..18: mol_type = other DNA
ctgtccaagcccggttga

SEQ ID NO: 15030 - DNA, 18 bp, synthetic construct
  misc_feature 1..18: note = Description of Artificial Sequence: Synthetic Antisense oligonucleotide
  modified_base 11..12: mod_base = OTHER; note = bicyclic nucleic acid (BNA)
  modified_base 17..18: mod_base = OTHER; note = bicyclic nucleic acid (BNA)
  source 1..18: mol_type = other DNA
ctgtccaagcccggttga

SEQ ID NO: 15031 - DNA, 18 bp, synthetic construct
  misc_feature 1..18: note = Description of Artificial Sequence: Synthetic Antisense oligonucleotide
  modified_base 5: mod_base = OTHER; note = bicyclic nucleic acid (BNA)
  modified_base 9: mod_base = OTHER; note = bicyclic nucleic acid (BNA)
  modified_base 17..18: mod_base = OTHER; note = bicyclic nucleic acid (BNA)
  source 1..18: mol_type = other DNA
ctgtccaagcccggttga

SEQ ID NO: 15032 - DNA, 18 bp, synthetic construct
  misc_feature 1..18: note = Description of Artificial Sequence: Synthetic Antisense oligonucleotide
  modified_base 3: mod_base = OTHER; note = bicyclic nucleic acid (BNA)
  modified_base 9: mod_base = OTHER; note = bicyclic nucleic acid (BNA)
  modified_base 17..18: mod_base = OTHER; note = bicyclic nucleic acid (BNA)
  source 1..18: mol_type = other DNA
ctgtccaagcccggttga

SEQ ID NO: 15033 - DNA, 18 bp, synthetic construct
  misc_feature 1..18: note = Description of Artificial Sequence: Synthetic Antisense oligonucleotide
  modified_base 6: mod_base = OTHER; note = bicyclic nucleic acid (BNA)
  modified_base 14: mod_base = OTHER; note = bicyclic nucleic acid (BNA)
  modified_base 17..18: mod_base = OTHER; note = bicyclic nucleic acid (BNA)
  source 1..18: mol_type = other DNA
ctgtccaagcccggttga

SEQ ID NO: 15034 - DNA, 18 bp, synthetic construct
  misc_feature 1..18: note = Description of Artificial Sequence: Synthetic Antisense oligonucleotide
  modified_base 9..10: mod_base = OTHER; note = bicyclic nucleic acid (BNA)
  modified_base 17..18: mod_base = OTHER; note = bicyclic nucleic acid (BNA)
  source 1..18: mol_type = other DNA
ctgtccaagcccggttga

SEQ ID NO: 15035 - DNA, 18 bp, synthetic construct
  misc_feature 1..18: note = Description of Artificial Sequence: Synthetic Antisense oligonucleotide
  modified_base 5: mod_base = OTHER; note = bicyclic nucleic acid (BNA)
  modified_base 13: mod_base = OTHER; note = bicyclic nucleic acid (BNA)
  modified_base 17..18: mod_base = OTHER; note = bicyclic nucleic acid (BNA)
  source 1..18: mol_type = other DNA
ctgtccaagcccggttga

SEQ ID NO: 15036 - DNA, 18 bp, synthetic construct
  misc_feature 1..18: note = Description of Artificial Sequence: Synthetic Antisense oligonucleotide
  modified_base 3: mod_base = OTHER; note = bicyclic nucleic acid (BNA)
  modified_base 13: mod_base = OTHER; note = bicyclic nucleic acid (BNA)
  modified_base 17..18: mod_base = OTHER; note = bicyclic nucleic acid (BNA)
  source 1..18: mol_type = other DNA
ctgtccaagcccggttga

SEQ ID NO: 15037 - DNA, 18 bp, synthetic construct
  misc_feature 1..18: note = Description of Artificial Sequence: Synthetic Antisense oligonucleotide
  modified_base 3: mod_base = OTHER; note = bicyclic nucleic acid (BNA)
  modified_base 6: mod_base = OTHER; note = bicyclic nucleic acid (BNA)
  modified_base 17..18: mod_base = OTHER; note = bicyclic nucleic acid (BNA)
  source 1..18: mol_type = other DNA
ctgtccaagcccggttga

SEQ ID NO: 15038 - DNA, 18 bp, synthetic construct
  misc_feature 1..18: note = Description of Artificial Sequence: Synthetic Antisense oligonucleotide
  modified_base 6: mod_base = OTHER; note = bicyclic nucleic acid (BNA)
  modified_base 9: mod_base = OTHER; note = bicyclic nucleic acid (BNA)
  modified_base 17..18: mod_base = OTHER; note = bicyclic nucleic acid (BNA)
  source 1..18: mol_type = other DNA
ctgtccaagcccggttga

SEQ ID NO: 15039 - DNA, 18 bp, synthetic construct
  misc_feature 1..18: note = Description of Artificial Sequence: Synthetic Antisense oligonucleotide
  modified_base 5: mod_base = OTHER; note = bicyclic nucleic acid (BNA)
  modified_base 10: mod_base = OTHER; note = bicyclic nucleic acid (BNA)
  modified_base 17..18: mod_base = OTHER; note = bicyclic nucleic acid (BNA)
  source 1..18: mol_type = other DNA
ctgtccaagcccggttga

SEQ ID NO: 15040 - DNA, 18 bp, synthetic construct
  misc_feature 1..18: note = Description of Artificial Sequence: Synthetic Antisense oligonucleotide
  modified_base 3: mod_base = OTHER; note = bicyclic nucleic acid (BNA)
  modified_base 10: mod_base = OTHER; note = bicyclic nucleic acid (BNA)
  modified_base 17..18: mod_base = OTHER; note = bicyclic nucleic acid (BNA)
  source 1..18: mol_type = other DNA
ctgtccaagcccggttga

SEQ ID NO: 15041 - DNA, 18 bp, synthetic construct
  misc_feature 1..18: note = Description of Artificial Sequence: Synthetic Antisense oligonucleotide
  modified_base 13..14: mod_base = OTHER; note = bicyclic nucleic acid (BNA)
  modified_base 17..18: mod_base = OTHER; note = bicyclic nucleic acid (BNA)
  source 1..18: mol_type = other DNA
ctgtccaagcccggttga

SEQ ID NO: 15042 - DNA, 18 bp, synthetic construct
  misc_feature 1..18: note = Description of Artificial Sequence: Synthetic Antisense oligonucleotide
  modified_base 6: mod_base = OTHER; note = bicyclic nucleic acid (BNA)
  modified_base 13: mod_base = OTHER; note = bicyclic nucleic acid (BNA)
  modified_base 17..18: mod_base = OTHER; note = bicyclic nucleic acid (BNA)
  source 1..18: mol_type = other DNA
ctgtccaagcccggttga

SEQ ID NO: 15043 - DNA, 18 bp, synthetic construct
  misc_feature 1..18: note = Description of Artificial Sequence: Synthetic Antisense oligonucleotide
  modified_base 9: mod_base = OTHER; note = bicyclic nucleic acid (BNA)
  modified_base 11: mod_base = OTHER; note = bicyclic nucleic acid (BNA)
  modified_base 17..18: mod_base = OTHER; note = bicyclic nucleic acid (BNA)
  source 1..18: mol_type = other DNA
ctgtccaagcccggttga

SEQ ID NO: 15044 - DNA, 18 bp, synthetic construct
  misc_feature 1..18: note = Description of Artificial Sequence: Synthetic Antisense oligonucleotide
  modified_base 11: mod_base = OTHER; note = bicyclic nucleic acid (BNA)
  modified_base 13: mod_base = OTHER; note = bicyclic nucleic acid (BNA)
  modified_base 17..18: mod_base = OTHER; note = bicyclic nucleic acid (BNA)
  source 1..18: mol_type = other DNA
ctgtccaagcccggttga

SEQ ID NO: 15045 - DNA, 18 bp, synthetic construct
  misc_feature 1..18: note = Description of Artificial Sequence: Synthetic Antisense oligonucleotide
  modified_base 5: mod_base = OTHER; note = bicyclic nucleic acid (BNA)
  modified_base 14: mod_base = OTHER; note = bicyclic nucleic acid (BNA)
  modified_base 17..18: mod_base = OTHER; note = bicyclic nucleic acid (BNA)
  source 1..18: mol_type = other DNA
ctgtccaagcccggttga

SEQ ID NO: 15046 - DNA, 18 bp, synthetic construct
  misc_feature 1..18: note = Description of Artificial Sequence: Synthetic Antisense oligonucleotide
  modified_base 3: mod_base = OTHER; note = bicyclic nucleic acid (BNA)
  modified_base 14: mod_base = OTHER; note = bicyclic nucleic acid (BNA)
  modified_base 17..18: mod_base = OTHER; note = bicyclic nucleic acid (BNA)
  source 1..18: mol_type = other DNA
ctgtccaagcccggttga

SEQ ID NO: 15047 - DNA, 18 bp, synthetic construct
  misc_feature 1..18: note = Description of Artificial Sequence: Synthetic Antisense oligonucleotide
  modified_base 10: mod_base = OTHER; note = bicyclic nucleic acid (BNA)
  modified_base 12: mod_base = OTHER; note = bicyclic nucleic acid (BNA)
  modified_base 17..18: mod_base = OTHER; note = bicyclic nucleic acid (BNA)
  source 1..18: mol_type = other DNA
ctgtccaagcccggttga

SEQ ID NO: 15048 - DNA, 18 bp, synthetic construct
  misc_feature 1..18: note = Description of Artificial Sequence: Synthetic Antisense oligonucleotide
  modified_base 12: mod_base = OTHER; note = bicyclic nucleic acid (BNA)
  modified_base 14: mod_base = OTHER; note = bicyclic nucleic acid (BNA)
  modified_base 17..18: mod_base = OTHER; note = bicyclic nucleic acid (BNA)
  source 1..18: mol_type = other DNA
ctgtccaagcccggttga

SEQ ID NO: 15049 - DNA, 18 bp, synthetic construct
  misc_feature 1..18: note = Description of Artificial Sequence: Synthetic Antisense oligonucleotide
  modified_base 5: mod_base = OTHER; note = bicyclic nucleic acid (BNA)
  modified_base 11: mod_base = OTHER; note = bicyclic nucleic acid (BNA)
  modified_base 17..18: mod_base = OTHER; note = bicyclic nucleic acid (BNA)
  source 1..18: mol_type = other DNA
ctgtccaagcccggttga

SEQ ID NO: 15050 - DNA, 18 bp, synthetic construct
  misc_feature 1..18: note = Description of Artificial Sequence: Synthetic Antisense oligonucleotide
  modified_base 6: mod_base = OTHER; note = bicyclic nucleic acid (BNA)
  modified_base 12: mod_base = OTHER; note = bicyclic nucleic acid (BNA)
  modified_base 17..18: mod_base = OTHER; note = bicyclic nucleic acid (BNA)
  source 1..18: mol_type = other DNA
ctgtccaagcccggttga

SEQ ID NO: 15051 - DNA, 18 bp, synthetic construct
  misc_feature 1..18: note = Description of Artificial Sequence: Synthetic Antisense oligonucleotide
  modified_base 5..6: mod_base = OTHER; note = bicyclic nucleic acid (BNA)
  modified_base 17..18: mod_base = OTHER; note = bicyclic nucleic acid (BNA)
  source 1..18: mol_type = other DNA
ctgtccaagcccggttga

SEQ ID NO: 15052 - DNA, 18 bp, synthetic construct
  misc_feature 1..18: note = Description of Artificial Sequence: Synthetic Antisense oligonucleotide
  modified_base 11: mod_base = OTHER; note = bicyclic nucleic acid (BNA)
  modified_base 14: mod_base = OTHER; note = bicyclic nucleic acid (BNA)
  modified_base 17..18: mod_base = OTHER; note = bicyclic nucleic acid (BNA)
  source 1..18: mol_type = other DNA
ctgtccaagcccggttga

SEQ ID NO: 15053 - DNA, 18 bp, synthetic construct
  misc_feature 1..18: note = Description of Artificial Sequence: Synthetic Antisense oligonucleotide
  modified_base 9: mod_base = OTHER; note = bicyclic nucleic acid (BNA)
  modified_base 12: mod_base = OTHER; note = bicyclic nucleic acid (BNA)
  modified_base 17..18: mod_base = OTHER; note = bicyclic nucleic acid (BNA)
  source 1..18: mol_type = other DNA
ctgtccaagcccggttga

SEQ ID NO: 15054 - DNA, 18 bp, synthetic construct
  misc_feature 1..18: note = Description of Artificial Sequence: Synthetic Antisense oligonucleotide
  modified_base 3: mod_base = OTHER; note = bicyclic nucleic acid (BNA)
  modified_base 11: mod_base = OTHER; note = bicyclic nucleic acid (BNA)
  modified_base 17..18: mod_base = OTHER; note = bicyclic nucleic acid (BNA)
  source 1..18: mol_type = other DNA
ctgtccaagcccggttga

SEQ ID NO: 15055 - DNA, 18 bp, synthetic construct
  misc_feature 1..18: note = Description of Artificial Sequence: Synthetic Antisense oligonucleotide
  modified_base 10..11: mod_base = OTHER; note = bicyclic nucleic acid (BNA)
  modified_base 17..18: mod_base = OTHER; note = bicyclic nucleic acid (BNA)
  source 1..18: mol_type = other DNA
ctgtccaagcccggttga

SEQ ID NO: 15056 - DNA, 18 bp, synthetic construct
  misc_feature 1..18: note = Description of Artificial Sequence: Synthetic Antisense oligonucleotide
  modified_base 12..13: mod_base = OTHER; note = bicyclic nucleic acid (BNA)
  modified_base 17..18: mod_base = OTHER; note = bicyclic nucleic acid (BNA)
  source 1..18: mol_type = other DNA
ctgtccaagcccggttga

SEQ ID NO: 15057 - DNA, 18 bp, synthetic construct
  misc_feature 1..18: note = Description of Artificial Sequence: Synthetic Antisense oligonucleotide
  modified_base 5: mod_base = OTHER; note = bicyclic nucleic acid (BNA)
  modified_base 12: mod_base = OTHER; note = bicyclic nucleic acid (BNA)
  modified_base 17..18: mod_base = OTHER; note = bicyclic nucleic acid (BNA)
  source 1..18: mol_type = other DNA
ctgtccaagcccggttga

SEQ ID NO: 15058 - DNA, 18 bp, synthetic construct
  misc_feature 1..18: note = Description of Artificial Sequence: Synthetic Antisense oligonucleotide
  modified_base 10: mod_base = OTHER; note = bicyclic nucleic acid (BNA)
  modified_base 14: mod_base = OTHER; note = bicyclic nucleic acid (BNA)
  modified_base 17..18: mod_base = OTHER; note = bicyclic nucleic acid (BNA)
  source 1..18: mol_type = other DNA
ctgtccaagcccggttga

SEQ ID NO: 15059 - DNA, 18 bp, synthetic construct
  misc_feature 1..18: note = Description of Artificial Sequence: Synthetic Antisense oligonucleotide
  modified_base 6: mod_base = OTHER; note = bicyclic nucleic acid (BNA)
  modified_base 11: mod_base = OTHER; note = bicyclic nucleic acid (BNA)
  modified_base 17..18: mod_base = OTHER; note = bicyclic nucleic acid (BNA)
  source 1..18: mol_type = other DNA
ctgtccaagcccggttga

SEQ ID NO: 15060 - DNA, 18 bp, synthetic construct
  misc_feature 1..18: note = Description of Artificial Sequence: Synthetic Antisense oligonucleotide
  modified_base 9: mod_base = OTHER; note = bicyclic nucleic acid (BNA)
  modified_base 13: mod_base = OTHER; note = bicyclic nucleic acid (BNA)
  modified_base 17..18: mod_base = OTHER; note = bicyclic nucleic acid (BNA)
  source 1..18: mol_type = other DNA
ctgtccaagcccggttga

SEQ ID NO: 15061 - DNA, 18 bp, synthetic construct
  misc_feature 1..18: note = Description of Artificial Sequence: Synthetic Antisense oligonucleotide
  modified_base 3: mod_base = OTHER; note = bicyclic nucleic acid (BNA)
  modified_base 12: mod_base = OTHER; note = bicyclic nucleic acid (BNA)
  modified_base 17..18: mod_base = OTHER; note = bicyclic nucleic acid (BNA)
  source 1..18: mol_type = other DNA
ctgtccaagcccggttga

SEQ ID NO: 15062 - DNA, 18 bp, synthetic construct
  misc_feature 1..18: note = Description of Artificial Sequence: Synthetic Antisense oligonucleotide
  modified_base 3: mod_base = OTHER; note = bicyclic nucleic acid (BNA)
  modified_base 5: mod_base = OTHER; note = bicyclic nucleic acid (BNA)
  modified_base 17..18: mod_base = OTHER; note = bicyclic nucleic acid (BNA)
  source 1..18: mol_type = other DNA
ctgtccaagcccggttga

SEQ ID NO: 15063 - DNA, 18 bp, synthetic construct
  misc_feature 1..18: note = Description of Artificial Sequence: Synthetic Antisense oligonucleotide
  modified_base 10: mod_base = OTHER; note = bicyclic nucleic acid (BNA)
  modified_base 13: mod_base = OTHER; note = bicyclic nucleic acid (BNA)
  modified_base 17..18: mod_base = OTHER; note = bicyclic nucleic acid (BNA)
  source 1..18: mol_type = other DNA
ctgtccaagcccggttga

SEQ ID NO: 15064 - DNA, 20 bp, synthetic construct
  misc_feature 1..20: note = Description of Artificial Sequence: Synthetic Antisense oligonucleotide
  modified_base 2: mod_base = OTHER; note = bicyclic nucleic acid (BNA)
  modified_base 19..20: mod_base = OTHER; note = bicyclic nucleic acid (BNA)
  source 1..20: mol_type = other DNA
tcaaggaagatggcatttct

SEQ ID NO: 15065 - DNA, 20 bp, synthetic construct
  misc_feature 1..20: note = Description of Artificial Sequence: Synthetic Antisense oligonucleotide
  modified_base 9: mod_base = OTHER; note = bicyclic nucleic acid (BNA)
  modified_base 19..20: mod_base = OTHER; note = bicyclic nucleic acid (BNA)
  source 1..20: mol_type = other DNA
tcaaggaagatggcatttct

SEQ ID NO: 15066 - DNA, 20 bp, synthetic construct
  misc_feature 1..20: note = Description of Artificial Sequence: Synthetic Antisense oligonucleotide
  modified_base 5: mod_base = OTHER; note = bicyclic nucleic acid (BNA)
  modified_base 19..20: mod_base = OTHER; note = bicyclic nucleic acid (BNA)
  source 1..20: mol_type = other DNA
tcaaggaagatggcatttct

SEQ ID NO: 15067 - DNA, 20 bp, synthetic construct
  misc_feature 1..20: note = Description of Artificial Sequence: Synthetic Antisense oligonucleotide
  modified_base 6: mod_base = OTHER; note = bicyclic nucleic acid (BNA)
  modified_base 19..20: mod_base = OTHER; note = bicyclic nucleic acid (BNA)
  source 1..20: mol_type = other DNA
tcaaggaagatggcatttct

SEQ ID NO: 15068 - DNA, 20 bp, synthetic construct
  misc_feature 1..20: note = Description of Artificial Sequence: Synthetic Antisense oligonucleotide
  modified_base 12: mod_base = OTHER; note = bicyclic nucleic acid (BNA)
  modified_base 19..20: mod_base = OTHER; note = bicyclic nucleic acid (BNA)
  source 1..20: mol_type = other DNA
tcaaggaagatggcatttct

SEQ ID NO: 15069 - DNA, 20 bp, synthetic construct
  misc_feature 1..20: note = Description of Artificial Sequence: Synthetic Antisense oligonucleotide
  modified_base 13: mod_base = OTHER; note = bicyclic nucleic acid (BNA)
  modified_base 19..20: mod_base = OTHER; note = bicyclic nucleic acid (BNA)
  source 1..20: mol_type = other DNA
tcaaggaagatggcatttct

SEQ ID NO: 15070 - DNA, 20 bp, synthetic construct
  misc_feature 1..20: note = Description of Artificial Sequence: Synthetic Antisense oligonucleotide
  modified_base 14: mod_base = OTHER; note = bicyclic nucleic acid (BNA)
  modified_base 19..20: mod_base = OTHER; note = bicyclic nucleic acid (BNA)
  source 1..20: mol_type = other DNA
tcaaggaagatggcatttct

SEQ ID NO: 15071 - DNA, 22 bp, synthetic construct
  misc_feature 1..22: note = Description of Artificial Sequence: Synthetic Antisense oligonucleotide
  modified_base 2: mod_base = OTHER; note = bicyclic nucleic acid (BNA)
  modified_base 21..22: mod_base = OTHER; note = bicyclic nucleic acid (BNA)
  source 1..22: mol_type = other DNA
tcaaggaagatggcatttctag

SEQ ID NO: 15072 - DNA, 22 bp, synthetic construct
  misc_feature 1..22: note = Description of Artificial Sequence: Synthetic Antisense oligonucleotide
  modified_base 9: mod_base = OTHER; note = bicyclic nucleic acid (BNA)
  modified_base 21..22: mod_base = OTHER; note = bicyclic nucleic acid (BNA)
  source 1..22: mol_type = other DNA
tcaaggaagatggcatttctag

SEQ ID NO: 15073 - DNA, 22 bp, synthetic construct
  misc_feature 1..22: note = Description of Artificial Sequence: Synthetic Antisense oligonucleotide
  modified_base 5: mod_base = OTHER; note = bicyclic nucleic acid (BNA)
  modified_base 21..22: mod_base = OTHER; note = bicyclic nucleic acid (BNA)
  source 1..22: mol_type = other DNA
tcaaggaagatggcatttctag

SEQ ID NO: 15074 - DNA, 22 bp, synthetic construct
  misc_feature 1..22: note = Description of Artificial Sequence: Synthetic Antisense oligonucleotide
  modified_base 6: mod_base = OTHER; note = bicyclic nucleic acid (BNA)
  modified_base 21..22: mod_base = OTHER; note = bicyclic nucleic acid (BNA)
  source 1..22: mol_type = other DNA
tcaaggaagatggcatttctag

SEQ ID NO: 15075 - DNA, 22 bp, synthetic construct
  misc_feature 1..22: note = Description of Artificial Sequence: Synthetic Antisense oligonucleotide
  modified_base 12: mod_base = OTHER; note = bicyclic nucleic acid (BNA)
  modified_base 21..22: mod_base = OTHER; note = bicyclic nucleic acid (BNA)
  source 1..22: mol_type = other DNA
tcaaggaagatggcatttctag

SEQ ID NO: 15076 - DNA, 22 bp, synthetic construct
  misc_feature 1..22: note = Description of Artificial Sequence: Synthetic Antisense oligonucleotide
  modified_base 13: mod_base = OTHER; note = bicyclic nucleic acid (BNA)
  modified_base 21..22: mod_base = OTHER; note = bicyclic nucleic acid (BNA)
  source 1..22: mol_type = other DNA
tcaaggaagatggcatttctag

SEQ ID NO: 15077 - DNA, 22 bp, synthetic construct
  misc_feature 1..22: note = Description of Artificial Sequence: Synthetic Antisense oligonucleotide
  modified_base 19: mod_base = OTHER; note = bicyclic nucleic acid (BNA)
  modified_base 21..22: mod_base = OTHER; note = bicyclic nucleic acid (BNA)
  source 1..22: mol_type = other DNA
tcaaggaagatggcatttctag

SEQ ID NO: 15078 - DNA, 22 bp, synthetic construct
  misc_feature 1..22: note = Description of Artificial Sequence: Synthetic Antisense oligonucleotide
  modified_base 14: mod_base = OTHER; note = bicyclic nucleic acid (BNA)
  modified_base 21..22: mod_base = OTHER; note = bicyclic nucleic acid (BNA)
  source 1..22: mol_type = other DNA
tcaaggaagatggcatttctag

SEQ ID NO: 15079 - DNA, 20 bp, synthetic construct
  misc_feature 1..20: note = Description of Artificial Sequence: Synthetic Antisense oligonucleotide
  modified_base 9: mod_base = OTHER; note = bicyclic nucleic acid (BNA)
  modified_base 14: mod_base = OTHER; note = bicyclic nucleic acid (BNA)
  modified_base 19..20: mod_base = OTHER; note = bicyclic nucleic acid (BNA)
  source 1..20: mol_type = other DNA
tcaaggaagatggcatttct

SEQ ID NO: 15080 - DNA, 20 bp, synthetic construct
  misc_feature 1..20: note = Description of Artificial Sequence: Synthetic Antisense oligonucleotide
  modified_base 5: mod_base = OTHER; note = bicyclic nucleic acid (BNA)
  modified_base 9: mod_base = OTHER; note = bicyclic nucleic acid (BNA)
  modified_base 19..20: mod_base = OTHER; note = bicyclic nucleic acid (BNA)
  source 1..20: mol_type = other DNA
tcaaggaagatggcatttct

SEQ ID NO: 15081 - DNA, 20 bp, synthetic construct
  misc_feature 1..20: note = Description of Artificial Sequence: Synthetic Antisense oligonucleotide
  modified_base 6: mod_base = OTHER; note = bicyclic nucleic acid (BNA)
  modified_base 14: mod_base = OTHER; note = bicyclic nucleic acid (BNA)
  modified_base 19..20: mod_base = OTHER; note = bicyclic nucleic acid (BNA)
  source 1..20: mol_type = other DNA
tcaaggaagatggcatttct

SEQ ID NO: 15082 - DNA, 20 bp, synthetic construct
  misc_feature 1..20: note = Description of Artificial Sequence: Synthetic Antisense oligonucleotide
  modified_base 5: mod_base = OTHER; note = bicyclic nucleic acid (BNA)
  modified_base 13: mod_base = OTHER; note = bicyclic nucleic acid (BNA)
  modified_base 19..20: mod_base = OTHER; note = bicyclic nucleic acid (BNA)
  source 1..20: mol_type = other DNA
tcaaggaagatggcatttct

SEQ ID NO: 15083 - DNA, 20 bp, synthetic construct
  misc_feature 1..20: note = Description of Artificial Sequence: Synthetic Antisense oligonucleotide
  modified_base 2: mod_base = OTHER; note = bicyclic nucleic acid (BNA)
  modified_base 12: mod_base = OTHER; note = bicyclic nucleic acid (BNA)
  modified_base 19..20: mod_base = OTHER; note = bicyclic nucleic acid (BNA)
  source 1..20: mol_type = other DNA
tcaaggaagatggcatttct

SEQ ID NO: 15084 - DNA, 20 bp, synthetic construct
  misc_feature 1..20: note = Description of Artificial Sequence: Synthetic Antisense oligonucleotide
  modified_base 6: mod_base = OTHER; note = bicyclic nucleic acid (BNA)
  modified_base 9: mod_base = OTHER; note = bicyclic nucleic acid (BNA)
  modified_base 19..20: mod_base = OTHER; note = bicyclic nucleic acid (BNA)
  source 1..20: mol_type = other DNA
tcaaggaagatggcatttct

SEQ ID NO: 15085 - DNA, 20 bp, synthetic construct
  misc_feature 1..20: note = Description of Artificial Sequence: Synthetic Antisense oligonucleotide
  modified_base 13..14: mod_base = OTHER; note = bicyclic nucleic acid (BNA)
  modified_base 19..20: mod_base = OTHER; note = bicyclic nucleic acid (BNA)
  source 1..20: mol_type = other DNA
tcaaggaagatggcatttct

SEQ ID NO: 15086 - DNA, 20 bp, synthetic construct
  misc_feature 1..20: note = Description of Artificial Sequence: Synthetic Antisense oligonucleotide
  modified_base 6: mod_base = OTHER; note = bicyclic nucleic acid (BNA)
  modified_base 13: mod_base = OTHER; note = bicyclic nucleic acid (BNA)
  modified_base 19..20: mod_base = OTHER; note = bicyclic nucleic acid (BNA)
  source 1..20: mol_type = other DNA
tcaaggaagatggcatttct

SEQ ID NO: 15087 - DNA, 20 bp, synthetic construct
  misc_feature 1..20: note = Description of Artificial Sequence: Synthetic Antisense oligonucleotide
  modified_base 5: mod_base = OTHER; note = bicyclic nucleic acid (BNA)
  modified_base 14: mod_base = OTHER; note = bicyclic nucleic acid (BNA)
  modified_base 19..20: mod_base = OTHER; note = bicyclic nucleic acid (BNA)
  source 1..20: mol_type = other DNA
tcaaggaagatggcatttct

SEQ ID NO: 15088 - DNA, 20 bp, synthetic construct
  misc_feature 1..20: note = Description of Artificial Sequence: Synthetic Antisense oligonucleotide
  modified_base 2: mod_base = OTHER; note = bicyclic nucleic acid (BNA)
  modified_base 6: mod_base = OTHER; note = bicyclic nucleic acid (BNA)
  modified_base 19..20: mod_base = OTHER; note = bicyclic nucleic acid (BNA)
  source 1..20: mol_type = other DNA
tcaaggaagatggcatttct

SEQ ID NO: 15089 - DNA, 20 bp, synthetic construct
  misc_feature 1..20: note = Description of Artificial Sequence: Synthetic Antisense oligonucleotide
  modified_base 12: mod_base = OTHER; note = bicyclic nucleic acid (BNA)
  modified_base 14: mod_base = OTHER; note = bicyclic nucleic acid (BNA)
  modified_base 19..20: mod_base = OTHER; note = bicyclic nucleic acid (BNA)
  source 1..20: mol_type = other DNA
tcaaggaagatggcatttct

SEQ ID NO: 15090 - DNA, 20 bp, synthetic construct
  misc_feature 1..20: note = Description of Artificial Sequence: Synthetic Antisense oligonucleotide
  modified_base 6: mod_base = OTHER; note = bicyclic nucleic acid (BNA)
  modified_base 12: mod_base = OTHER; note = bicyclic nucleic acid (BNA)
  modified_base 19..20: mod_base = OTHER; note = bicyclic nucleic acid (BNA)
  source 1..20: mol_type = other DNA
tcaaggaagatggcatttct

SEQ ID NO: 15091 - DNA, 20 bp, synthetic construct
  misc_feature 1..20: note = Description of Artificial Sequence: Synthetic Antisense oligonucleotide
  modified_base 5..6: mod_base = OTHER; note = bicyclic nucleic acid (BNA)
  modified_base 19..20: mod_base = OTHER; note = bicyclic nucleic acid (BNA)
  source 1..20: mol_type = other DNA
tcaaggaagatggcatttct

SEQ ID NO: 15092 - DNA, 20 bp, synthetic construct
  misc_feature 1..20: note = Description of Artificial Sequence: Synthetic Antisense oligonucleotide
  modified_base 2: mod_base = OTHER; note = bicyclic nucleic acid (BNA)
  modified_base 14: mod_base = OTHER; note = bicyclic nucleic acid (BNA)
  modified_base 19..20: mod_base = OTHER; note = bicyclic nucleic acid (BNA)
  source 1..20: mol_type = other DNA
tcaaggaagatggcatttct

SEQ ID NO: 15093 - DNA, 20 bp, synthetic construct
  misc_feature 1..20: note = Description of Artificial Sequence: Synthetic Antisense oligonucleotide
  modified_base 9: mod_base = OTHER; note = bicyclic nucleic acid (BNA)
  modified_base 12: mod_base = OTHER; note = bicyclic nucleic acid (BNA)
  modified_base 19..20: mod_base = OTHER; note = bicyclic nucleic acid (BNA)
  source 1..20: mol_type = other DNA
tcaaggaagatggcatttct

SEQ ID NO: 15094 - DNA, 20 bp, synthetic construct
  misc_feature 1..20: note = Description of Artificial Sequence: Synthetic Antisense oligonucleotide
  modified_base 2: mod_base = OTHER; note = bicyclic nucleic acid (BNA)
  modified_base 5: mod_base = OTHER; note = bicyclic nucleic acid (BNA)
  modified_base 19..20: mod_base = OTHER; note = bicyclic nucleic acid (BNA)
  source 1..20: mol_type = other DNA
tcaaggaagatggcatttct

SEQ ID NO: 15095 - DNA, 20 bp, synthetic construct
  misc_feature 1..20: note = Description of Artificial Sequence: Synthetic Antisense oligonucleotide
  modified_base 12..13: mod_base = OTHER; note = bicyclic nucleic acid (BNA)
  modified_base 19..20: mod_base = OTHER; note = bicyclic nucleic acid (BNA)
  source 1..20: mol_type = other DNA
tcaaggaagatggcatttct

SEQ ID NO: 15096 - DNA, 20 bp, synthetic construct
  misc_feature 1..20: note = Description of Artificial Sequence: Synthetic Antisense oligonucleotide
  modified_base 5: mod_base = OTHER; note = bicyclic nucleic acid (BNA)
  modified_base 12: mod_base = OTHER; note = bicyclic nucleic acid (BNA)
  modified_base 19..20: mod_base = OTHER; note = bicyclic nucleic acid (BNA)
  source 1..20: mol_type = other DNA
tcaaggaagatggcatttct

SEQ ID NO: 15097 - DNA, 20 bp, synthetic construct
  misc_feature 1..20: note = Description of Artificial Sequence: Synthetic Antisense oligonucleotide
  modified_base 2: mod_base = OTHER; note = bicyclic nucleic acid (BNA)
  modified_base 13: mod_base = OTHER; note = bicyclic nucleic acid (BNA)
  modified_base 19..20: mod_base = OTHER; note = bicyclic nucleic acid (BNA)
  source 1..20: mol_type = other DNA
tcaaggaagatggcatttct

SEQ ID NO: 15098 - DNA, 20 bp, synthetic construct
  misc_feature 1..20: note = Description of Artificial Sequence: Synthetic Antisense oligonucleotide
  modified_base 9: mod_base = OTHER; note = bicyclic nucleic acid (BNA)
  modified_base 13: mod_base = OTHER; note = bicyclic nucleic acid (BNA)
  modified_base 19..20: mod_base = OTHER; note = bicyclic nucleic acid (BNA)
  source 1..20: mol_type = other DNA
tcaaggaagatggcatttct

SEQ ID NO: 15099 - DNA, 20 bp, synthetic construct
  misc_feature 1..20: note = Description of Artificial Sequence: Synthetic Antisense oligonucleotide
  modified_base 2: mod_base = OTHER; note = bicyclic nucleic acid (BNA)
  modified_base 9: mod_base = OTHER; note = bicyclic nucleic acid (BNA)
  modified_base 19..20: mod_base = OTHER; note = bicyclic nucleic acid (BNA)
  source 1..20: mol_type = other DNA
tcaaggaagatggcatttct

SEQ ID NO: 15100 - DNA, 22 bp, synthetic construct
  misc_feature 1..22: note = Description of Artificial Sequence: Synthetic Antisense oligonucleotide
  modified_base 9: mod_base = OTHER; note = bicyclic nucleic acid (BNA)
  modified_base 14: mod_base = OTHER; note = bicyclic nucleic acid (BNA)
  modified_base 21..22: mod_base = OTHER; note = bicyclic nucleic acid (BNA)
  source 1..22: mol_type = other DNA
tcaaggaagatggcatttctag

SEQ ID NO: 15101 - DNA, 22 bp, synthetic construct
  misc_feature 1..22: note = Description of Artificial Sequence: Synthetic Antisense oligonucleotide
  modified_base 5: mod_base = OTHER; note = bicyclic nucleic acid (BNA)
  modified_base 9: mod_base = OTHER; note = bicyclic nucleic acid (BNA)
  modified_base 21..22: mod_base = OTHER; note = bicyclic nucleic acid (BNA)
  source 1..22: mol_type = other DNA
tcaaggaagatggcatttctag

SEQ ID NO: 15102 - DNA, 22 bp, synthetic construct
  misc_feature 1..22: note = Description of Artificial Sequence: Synthetic Antisense oligonucleotide
  modified_base 5: mod_base = OTHER; note = bicyclic nucleic acid (BNA)
  modified_base 19: mod_base = OTHER; note = bicyclic nucleic acid (BNA)
  modified_base 21..22: mod_base = OTHER; note = bicyclic nucleic acid (BNA)
  source 1..22: mol_type = other DNA
tcaaggaagatggcatttctag

SEQ ID NO: 15103 - DNA, 22 bp, synthetic construct
  misc_feature 1..22: note = Description of Artificial Sequence: Synthetic Antisense oligonucleotide
  modified_base 6: mod_base = OTHER; note = bicyclic nucleic acid (BNA)
  modified_base 14: mod_base = OTHER; note = bicyclic nucleic acid (BNA)
  modified_base 21..22: mod_base = OTHER; note = bicyclic nucleic acid (BNA)
  source 1..22: mol_type = other DNA
tcaaggaagatggcatttctag

SEQ ID NO: 15104 - DNA, 22 bp, synthetic construct
  misc_feature 1..22: note = Description of Artificial Sequence: Synthetic Antisense oligonucleotide
  modified_base 5: mod_base = OTHER; note = bicyclic nucleic acid (BNA)
  modified_base 13: mod_base = OTHER; note = bicyclic nucleic acid (BNA)
  modified_base 21..22: mod_base = OTHER; note = bicyclic nucleic acid (BNA)
  source 1..22: mol_type = other DNA
tcaaggaagatggcatttctag

SEQ ID NO: 15105 - DNA, 22 bp, synthetic construct
  misc_feature 1..22: note = Description of Artificial Sequence: Synthetic Antisense oligonucleotide
  modified_base 2: mod_base = OTHER; note = bicyclic nucleic acid (BNA)
  modified_base 12: mod_base = OTHER; note = bicyclic nucleic acid (BNA)
  modified_base 21..22: mod_base = OTHER; note = bicyclic nucleic acid (BNA)
  source 1..22: mol_type = other DNA
tcaaggaagatggcatttctag

SEQ ID NO: 15106 - DNA, 22 bp, synthetic construct
  misc_feature 1..22: note = Description of Artificial Sequence: Synthetic Antisense oligonucleotide
  modified_base 6: mod_base = OTHER; note = bicyclic nucleic acid (BNA)
  modified_base 9: mod_base = OTHER; note = bicyclic nucleic acid (BNA)
  modified_base 21..22: mod_base = OTHER; note = bicyclic nucleic acid (BNA)
  source 1..22: mol_type = other DNA
tcaaggaagatggcatttctag

SEQ ID NO: 15107 - DNA, 22 bp, synthetic construct
  misc_feature 1..22: note = Description of Artificial Sequence: Synthetic Antisense oligonucleotide
  modified_base 13..14: mod_base = OTHER; note = bicyclic nucleic acid (BNA)
  modified_base 21..22: mod_base = OTHER; note = bicyclic nucleic acid (BNA)
  source 1..22: mol_type = other DNA
tcaaggaagatggcatttctag

SEQ ID NO: 15108 - DNA, 22 bp, synthetic construct
  misc_feature 1..22: note = Description of Artificial Sequence: Synthetic Antisense oligonucleotide
  modified_base 6: mod_base = OTHER; note = bicyclic nucleic acid (BNA)
  modified_base 13: mod_base = OTHER; note = bicyclic nucleic acid (BNA)
  modified_base 21..22: mod_base = OTHER; note = bicyclic nucleic acid (BNA)
  source 1..22: mol_type = other DNA
tcaaggaagatggcatttctag

SEQ ID NO: 15109 - DNA, 22 bp, synthetic construct
  misc_feature 1..22: note = Description of Artificial Sequence: Synthetic Antisense oligonucleotide
  modified_base 6: mod_base = OTHER; note = bicyclic nucleic acid (BNA)
  modified_base 19: mod_base = OTHER; note = bicyclic nucleic acid (BNA)
  modified_base 21..22: mod_base = OTHER; note = bicyclic nucleic acid (BNA)
  source 1..22: mol_type = other DNA
tcaaggaagatggcatttctag

SEQ ID NO: 15110 - DNA, 22 bp, synthetic construct
  misc_feature 1..22: note = Description of Artificial Sequence: Synthetic Antisense oligonucleotide
  modified_base 5: mod_base = OTHER; note = bicyclic nucleic acid (BNA)
  modified_base 14: mod_base = OTHER; note = bicyclic nucleic acid (BNA)
  modified_base 21..22: mod_base = OTHER; note = bicyclic nucleic acid (BNA)
  source 1..22: mol_type = other DNA
tcaaggaagatggcatttctag

SEQ ID NO: 15111 - DNA, 22 bp, synthetic construct
  misc_feature 1..22: note = Description of Artificial Sequence: Synthetic Antisense oligonucleotide
  modified_base 2: mod_base = OTHER; note = bicyclic nucleic acid (BNA)
  modified_base 6: mod_base = OTHER; note = bicyclic nucleic acid (BNA)
  modified_base 21..22: mod_base = OTHER; note = bicyclic nucleic acid (BNA)
  source 1..22: mol_type = other DNA
tcaaggaagatggcatttctag

SEQ ID NO: 15112 - DNA, 22 bp, synthetic construct
  misc_feature 1..22: note = Description of Artificial Sequence: Synthetic Antisense oligonucleotide
  modified_base 12: mod_base = OTHER; note = bicyclic nucleic acid (BNA)
  modified_base 19: mod_base = OTHER; note = bicyclic nucleic acid (BNA)
  modified_base 21..22: mod_base = OTHER; note = bicyclic nucleic acid (BNA)
  source 1..22: mol_type = other DNA
tcaaggaagatggcatttctag

SEQ ID NO: 15113 - DNA, 22 bp, synthetic construct
  misc_feature 1..22: note = Description of Artificial Sequence: Synthetic Antisense oligonucleotide
  modified_base 12: mod_base = OTHER; note = bicyclic nucleic acid (BNA)
  modified_base 14: mod_base = OTHER; note = bicyclic nucleic acid (BNA)
  modified_base 21..22: mod_base = OTHER; note = bicyclic nucleic acid (BNA)
  source 1..22: mol_type = other DNA
tcaaggaagatggcatttctag

SEQ ID NO: 15114 - DNA, 22 bp, synthetic construct
  misc_feature 1..22: note = Description of Artificial Sequence: Synthetic Antisense oligonucleotide
  modified_base 6: mod_base = OTHER; note = bicyclic nucleic acid (BNA)
  modified_base 12: mod_base = OTHER; note = bicyclic nucleic acid (BNA)
  modified_base 21..22: mod_base = OTHER; note = bicyclic nucleic acid (BNA)
  source 1..22: mol_type = other DNA
tcaaggaagatggcatttctag

SEQ ID NO: 15115 - DNA, 22 bp, synthetic construct
  misc_feature 1..22: note = Description of Artificial Sequence: Synthetic Antisense oligonucleotide
  modified_base 5..6: mod_base = OTHER; note = bicyclic nucleic acid (BNA)
  modified_base 21..22: mod_base = OTHER; note = bicyclic nucleic acid (BNA)
  source 1..22: mol_type = other DNA
tcaaggaagatggcatttctag

SEQ ID NO: 15116 - DNA, 22 bp, synthetic construct
  misc_feature 1..22: note = Description of Artificial Sequence: Synthetic Antisense oligonucleotide
  modified_base 2: mod_base = OTHER; note = bicyclic nucleic acid (BNA)
  modified_base 14: mod_base = OTHER; note = bicyclic nucleic acid (BNA)
  modified_base 21..22: mod_base = OTHER; note = bicyclic nucleic acid (BNA)
  source 1..22: mol_type = other DNA
tcaaggaagatggcatttctag

SEQ ID NO: 15117 - DNA, 22 bp, synthetic construct
  misc_feature 1..22: note = Description of Artificial Sequence: Synthetic Antisense oligonucleotide
  modified_base 9: mod_base = OTHER; note = bicyclic nucleic acid (BNA)
  modified_base 12: mod_base = OTHER; note = bicyclic nucleic acid (BNA)
  modified_base 21..22: mod_base = OTHER; note = bicyclic nucleic acid (BNA)
  source 1..22: mol_type = other DNA
tcaaggaagatggcatttctag

SEQ ID NO: 15118 - DNA, 22 bp, synthetic construct
  misc_feature 1..22: note = Description of Artificial Sequence: Synthetic Antisense oligonucleotide
  modified_base 2: mod_base = OTHER; note = bicyclic nucleic acid (BNA)
  modified_base 5: mod_base = OTHER; note = bicyclic nucleic acid (BNA)
  modified_base 21..22: mod_base = OTHER; note = bicyclic nucleic acid (BNA)
  source 1..22: mol_type = other DNA
tcaaggaagatggcatttctag

SEQ ID NO: 15119 - DNA, 22 bp, synthetic construct
  misc_feature 1..22: note = Description of Artificial Sequence: Synthetic Antisense oligonucleotide
  modified_base 13: mod_base = OTHER; note = bicyclic nucleic acid (BNA)
  modified_base 19: mod_base = OTHER; note = bicyclic nucleic acid (BNA)
  modified_base 21..22: mod_base = OTHER; note = bicyclic nucleic acid (BNA)
  source 1..22: mol_type = other DNA
tcaaggaagatggcatttctag

SEQ ID NO: 15120 - DNA, 22 bp, synthetic construct
  misc_feature 1..22: note = Description of Artificial Sequence: Synthetic Antisense oligonucleotide
  modified_base 12..13: mod_base = OTHER; note = bicyclic nucleic acid (BNA)
  modified_base 21..22: mod_base = OTHER; note = bicyclic nucleic acid (BNA)
  source 1..22: mol_type = other DNA
tcaaggaagatggcatttctag

SEQ ID NO: 15121 - DNA, 22 bp, synthetic construct
  misc_feature 1..22: note = Description of Artificial Sequence: Synthetic Antisense oligonucleotide
  modified_base 5: mod_base = OTHER; note = bicyclic nucleic acid (BNA)
  modified_base 12: mod_base = OTHER; note = bicyclic nucleic acid (BNA)
  modified_base 21..22: mod_base = OTHER; note = bicyclic nucleic acid (BNA)
  source 1..22: mol_type = other DNA
tcaaggaagatggcatttctag

SEQ ID NO: 15122 - DNA, 22 bp, synthetic construct
  misc_feature 1..22: note = Description of Artificial Sequence: Synthetic Antisense oligonucleotide
  modified_base 2: mod_base = OTHER; note = bicyclic nucleic acid (BNA)
  modified_base 13: mod_base = OTHER; note = bicyclic nucleic acid (BNA)
  modified_base 21..22: mod_base = OTHER; note = bicyclic nucleic acid (BNA)
  source 1..22: mol_type = other DNA
tcaaggaagatggcatttctag

SEQ ID NO: 15123 - DNA, 22 bp, synthetic construct
  misc_feature 1..22: note = Description of Artificial Sequence: Synthetic Antisense oligonucleotide
  modified_base 9: mod_base = OTHER; note = bicyclic nucleic acid (BNA)
  modified_base 13: mod_base = OTHER; note = bicyclic nucleic acid (BNA)
  modified_base 21..22: mod_base = OTHER; note = bicyclic nucleic acid (BNA)
  source 1..22: mol_type = other DNA
tcaaggaagatggcatttctag

SEQ ID NO: 15124 - DNA, 22 bp, synthetic construct
  misc_feature 1..22: note = Description of Artificial Sequence: Synthetic Antisense oligonucleotide
  modified_base 2: mod_base = OTHER; note = bicyclic nucleic acid (BNA)
  modified_base 19: mod_base = OTHER; note = bicyclic nucleic acid (BNA)
  modified_base 21..22: mod_base = OTHER; note = bicyclic nucleic acid (BNA)
  source 1..22: mol_type = other DNA
tcaaggaagatggcatttctag

SEQ ID NO: 15125 - DNA, 22 bp, synthetic construct
  misc_feature 1..22: note = Description of Artificial Sequence: Synthetic Antisense oligonucleotide
  modified_base 2: mod_base = OTHER; note = bicyclic nucleic acid (BNA)
  modified_base 9: mod_base = OTHER; note = bicyclic nucleic acid (BNA)
  modified_base 21..22: mod_base = OTHER; note = bicyclic nucleic acid (BNA)
  source 1..22: mol_type = other DNA
tcaaggaagatggcatttctag

SEQ ID NO: 15126 - DNA, 22 bp, synthetic construct
  misc_feature 1..22: note = Description of Artificial Sequence: Synthetic Antisense oligonucleotide
  modified_base 14: mod_base = OTHER; note = bicyclic nucleic acid (BNA)
  modified_base 19: mod_base = OTHER; note = bicyclic nucleic acid (BNA)
  modified_base 21..22: mod_base = OTHER; note = bicyclic nucleic acid (BNA)
  source 1..22: mol_type = other DNA
tcaaggaagatggcatttctag

SEQ ID NO: 15127 - DNA, 22 bp, synthetic construct
  misc_feature 1..22: note = Description of Artificial Sequence: Synthetic Antisense oligonucleotide
  modified_base 9: mod_base = OTHER; note = bicyclic nucleic acid (BNA)
  modified_base 19: mod_base = OTHER; note = bicyclic nucleic acid (BNA)
  modified_base 21..22: mod_base = OTHER; note = bicyclic nucleic acid (BNA)
  source 1..22: mol_type = other DNA
tcaaggaagatggcatttctag

SEQ ID NO: 15128 - DNA, 18 bp, synthetic construct
  misc_feature 1..18: note = Description of Artificial Sequence: Synthetic Antisense oligonucleotide
  modified_base 2: mod_base = OTHER; note = bicyclic nucleic acid (BNA)
  modified_base 17..18: mod_base = OTHER; note = bicyclic nucleic acid (BNA)
  modified_base 9: mod_base = OTHER; note = 5-methyl
  modified_base 13..14: mod_base = OTHER; note = 5-methyl
  modified_base 18: mod_base = OTHER; note = 5-methyl
  source 1..18: mol_type = other DNA
ggtaagttctgtccaagc

SEQ ID NO: 15129 - DNA, 18 bp, synthetic construct
  misc_feature 1..18: note = Description of Artificial Sequence: Synthetic Antisense oligonucleotide
  modified_base 9: mod_base = OTHER; note = 5-methyl
  modified_base 13..14: mod_base = OTHER; note = 5-methyl
  modified_base 18: mod_base = OTHER; note = 5-methyl
  modified_base 9: mod_base = OTHER; note = bicyclic nucleic acid (BNA)
  modified_base 17..18: mod_base = OTHER; note = bicyclic nucleic acid (BNA)
  source 1..18: mol_type = other DNA
ggtaagttctgtccaagc

SEQ ID NO: 15130 - DNA, 18 bp, synthetic construct
  misc_feature 1..18: note = Description of Artificial Sequence: Synthetic Antisense oligonucleotide
  modified_base 9: mod_base = OTHER; note = 5-methyl
  modified_base 13..14: mod_base = OTHER; note = 5-methyl
  modified_base 18: mod_base = OTHER; note = 5-methyl
  modified_base 11: mod_base = OTHER; note = bicyclic nucleic acid (BNA)
  modified_base 17..18: mod_base = OTHER; note = bicyclic nucleic acid (BNA)
  source 1..18: mol_type = other DNA
ggtaagttctgtccaagc

SEQ ID NO: 15131 - DNA, 18 bp, synthetic construct
  misc_feature 1..18: note = Description of Artificial Sequence: Synthetic Antisense oligonucleotide
  modified_base 6: mod_base = OTHER; note = bicyclic nucleic acid (BNA)
  modified_base 17..18: mod_base = OTHER; note = bicyclic nucleic acid (BNA)
  modified_base 9: mod_base = OTHER; note = 5-methyl
  modified_base 13..14: mod_base = OTHER; note = 5-methyl
  modified_base 18: mod_base = OTHER; note = 5-methyl
  source 1..18: mol_type = other DNA
ggtaagttctgtccaagc

SEQ ID NO: 15132 - DNA, 18 bp, synthetic construct
  misc_feature 1..18: note = Description of Artificial Sequence: Synthetic Antisense oligonucleotide
  modified_base 9: mod_base = OTHER; note = 5-methyl
  modified_base 13..14: mod_base = OTHER; note = 5-methyl
  modified_base 18: mod_base = OTHER; note = 5-methyl
  modified_base 13: mod_base = OTHER; note = bicyclic nucleic acid (BNA)
  modified_base 17..18: mod_base = OTHER; note = bicyclic nucleic acid (BNA)
  source 1..18: mol_type = other DNA
ggtaagttctgtccaagc

SEQ ID NO: 15133 - DNA, 18 bp, synthetic construct
  misc_feature 1..18: note = Description of Artificial Sequence: Synthetic Antisense oligonucleotide
  modified_base 9: mod_base = OTHER; note = 5-methyl
  modified_base 13..14: mod_base = OTHER; note = 5-methyl
  modified_base 18: mod_base = OTHER; note = 5-methyl
  modified_base 14: mod_base = OTHER; note = bicyclic nucleic acid (BNA)
  modified_base 17..18: mod_base = OTHER; note = bicyclic nucleic acid (BNA)
  source 1..18: mol_type = other DNA
ggtaagttctgtccaagc

SEQ ID NO: 15134 - DNA, 18 bp, synthetic construct
  misc_feature 1..18: note = Description of Artificial Sequence: Synthetic Antisense oligonucleotide
  modified_base 8: mod_base = OTHER; note = 5-methyl
  modified_base 12..13: mod_base = OTHER; note = 5-methyl
  modified_base 17..18: mod_base = OTHER; note = 5-methyl
  modified_base 16..18: mod_base = OTHER; note = bicyclic nucleic acid (BNA)
  source 1..18: mol_type = other DNA
gtaagttctgtccaagcc

SEQ ID NO: 15135 - DNA, 18 bp, synthetic construct
  misc_feature 1..18: note = Description of Artificial Sequence: Synthetic Antisense oligonucleotide
  modified_base 8: mod_base = OTHER; note = 5-methyl
  modified_base 12..13: mod_base = OTHER; note = 5-methyl
  modified_base 17..18: mod_base = OTHER; note = 5-methyl
  modified_base 10: mod_base = OTHER; note = bicyclic nucleic acid (BNA)
  modified_base 17..18: mod_base = OTHER; note = bicyclic nucleic acid (BNA)
  source 1..18: mol_type = other DNA
gtaagttctgtccaagcc

SEQ ID NO: 15136 - DNA, 18 bp, synthetic construct
  misc_feature 1..18: note = Description of Artificial Sequence: Synthetic Antisense oligonucleotide
  modified_base 5: mod_base = OTHER; note = bicyclic nucleic acid (BNA)
  modified_base 17..18: mod_base = OTHER; note = bicyclic nucleic acid (BNA)
  modified_base 8: mod_base = OTHER; note = 5-methyl
  modified_base 12..13: mod_base = OTHER; note = 5-methyl
  modified_base 17..18: mod_base = OTHER; note = 5-methyl
  source 1..18: mol_type = other DNA
gtaagttctgtccaagcc

SEQ ID NO: 15137 - DNA, 18 bp, synthetic construct
  misc_feature 1..18: note = Description of Artificial Sequence: Synthetic Antisense oligonucleotide
  modified_base 8: mod_base = OTHER; note = 5-methyl
  modified_base 12..13: mod_base = OTHER; note = 5-methyl
  modified_base 17..18: mod_base = OTHER; note = 5-methyl
  modified_base 12: mod_base = OTHER; note = bicyclic nucleic acid (BNA)
  modified_base 17..18: mod_base = OTHER; note = bicyclic nucleic acid (BNA)
  source 1..18: mol_type = other DNA
gtaagttctgtccaagcc

SEQ ID NO: 15138 - DNA, 18 bp, synthetic construct
  misc_feature 1..18: note = Description of Artificial Sequence: Synthetic Antisense oligonucleotide
  modified_base 8: mod_base = OTHER; note = 5-methyl
  modified_base 12..13: mod_base = OTHER; note = 5-methyl
  modified_base 17..18: mod_base = OTHER; note = 5-methyl
  modified_base 13: mod_base = OTHER; note = bicyclic nucleic acid (BNA)
  modified_base 17..18: mod_base = OTHER; note = bicyclic nucleic acid (BNA)
  source 1..18: mol_type = other DNA
gtaagttctgtccaagcc

SEQ ID NO: 15139 - DNA, 18 bp, synthetic construct
  misc_feature 1..18: note = Description of Artificial Sequence: Synthetic Antisense oligonucleotide
  modified_base 8: mod_base = OTHER; note = 5-methyl
  modified_base 12..13: mod_base = OTHER; note = 5-methyl
  modified_base 17..18: mod_base = OTHER; note = 5-methyl
  modified_base 8: mod_base = OTHER; note = bicyclic nucleic acid (BNA)
  modified_base 17..18: mod_base = OTHER; note = bicyclic nucleic acid (BNA)
  source 1..18: mol_type = other DNA
gtaagttctgtccaagcc

SEQ ID NO: 15140 - DNA, 18 bp, synthetic construct
  misc_feature 1..18: note = Description of Artificial Sequence: Synthetic Antisense oligonucleotide
  modified_base 2: mod_base = OTHER; note = bicyclic nucleic acid (BNA)
  modified_base 17..18: mod_base = OTHER; note = bicyclic nucleic acid (BNA)
  modified_base 4: mod_base = OTHER; note = 5-methyl
  modified_base 13: mod_base = OTHER; note = 5-methyl
  modified_base 17..18: mod_base = OTHER; note = 5-methyl
  source 1..18: mol_type = other DNA
agtcggtaagttctgtcc

SEQ ID NO: 15141 - DNA, 18 bp, synthetic construct
  misc_feature 1..18: note = Description of Artificial Sequence: Synthetic Antisense oligonucleotide
  modified_base 4: mod_base = OTHER; note = 5-methyl
  modified_base 13: mod_base = OTHER; note = 5-methyl
  modified_base 17..18: mod_base = OTHER; note = 5-methyl
  modified_base 4: mod_base = OTHER; note = bicyclic nucleic acid (BNA)
  modified_base 17..18: mod_base = OTHER; note = bicyclic nucleic acid (BNA)
  source 1..18: mol_type = other DNA
agtcggtaagttctgtcc

SEQ ID NO: 15142 - DNA, 18 bp, synthetic construct
  misc_feature 1..18: note = Description of Artificial Sequence: Synthetic Antisense oligonucleotide
  modified_base 4: mod_base = OTHER; note = 5-methyl
  modified_base 13: mod_base = OTHER; note = 5-methyl
  modified_base 17..18: mod_base = OTHER; note = 5-methyl
  modified_base 10: mod_base = OTHER; note = bicyclic nucleic acid (BNA)
  modified_base 17..18: mod_base = OTHER; note = bicyclic nucleic acid (BNA)
  source 1..18: mol_type = other DNA
agtcggtaagttctgtcc

SEQ ID NO: 15143 - DNA, 18 bp, synthetic construct
  misc_feature 1..18: note = Description of Artificial Sequence: Synthetic Antisense oligonucleotide
  modified_base 4: mod_base = OTHER; note = 5-methyl
  modified_base 13: mod_base = OTHER; note = 5-methyl
  modified_base 17..18: mod_base = OTHER; note = 5-methyl
  modified_base 5: mod_base = OTHER; note = bicyclic nucleic acid (BNA)
  modified_base 17..18: mod_base = OTHER; note = bicyclic nucleic acid (BNA)
  source 1..18: mol_type = other DNA
agtcggtaagttctgtcc

SEQ ID NO: 15144 - DNA, 18 bp, synthetic construct
  misc_feature 1..18: note = Description of Artificial Sequence: Synthetic Antisense oligonucleotide
  modified_base 4: mod_base = OTHER; note = 5-methyl
  modified_base 13: mod_base = OTHER; note = 5-methyl
  modified_base 17..18: mod_base = OTHER; note = 5-methyl
  modified_base 6: mod_base = OTHER; note = bicyclic nucleic acid (BNA)
  modified_base 17..18: mod_base = OTHER; note = bicyclic nucleic acid (BNA)
  source 1..18: mol_type = other DNA
agtcggtaagttctgtcc

SEQ ID NO: 15145 - DNA, 18 bp, synthetic construct
  misc_feature 1..18: note = Description of Artificial Sequence: Synthetic Antisense oligonucleotide
  modified_base 4: mod_base = OTHER; note = 5-methyl
  modified_base 13: mod_base = OTHER; note = 5-methyl
  modified_base 17..18: mod_base = OTHER; note = 5-methyl
  modified_base 13: mod_base = OTHER; note = bicyclic nucleic acid (BNA)
  modified_base 17..18: mod_base = OTHER; note = bicyclic nucleic acid (BNA)
  source 1..18: mol_type = other DNA
agtcggtaagttctgtcc

SEQ ID NO: 15146 - DNA, 18 bp, synthetic construct
  misc_feature 1..18: note = Description of Artificial Sequence: Synthetic Antisense oligonucleotide
  modified_base 4: mod_base = OTHER; note = 5-methyl
  modified_base 13: mod_base = OTHER; note = 5-methyl
  modified_base 17..18: mod_base = OTHER; note = 5-methyl
  modified_base 15: mod_base = OTHER; note = bicyclic nucleic acid (BNA)
  modified_base 17..18: mod_base = OTHER; note = bicyclic nucleic acid (BNA)
  source 1..18: mol_type = other DNA
agtcggtaagttctgtcc

SEQ ID NO: 15147 - DNA, 18 bp, synthetic construct
  misc_feature 1..18: note = Description of Artificial Sequence: Synthetic Antisense oligonucleotide
  modified_base 1: mod_base = OTHER; note = 5-methyl
  modified_base 5..6: mod_base = OTHER; note = 5-methyl
  modified_base 10..12: mod_base = OTHER; note = 5-methyl
  modified_base 3: mod_base = OTHER; note = bicyclic nucleic acid (BNA)
  modified_base 17..18: mod_base = OTHER; note = bicyclic nucleic acid (BNA)
  source 1..18: mol_type = other DNA
ctgtccaagcccggttga

SEQ ID NO: 15148 - DNA, 18 bp, synthetic construct
  misc_feature 1..18: note = Description of Artificial Sequence: Synthetic Antisense oligonucleotide
  modified_base 1: mod_base = OTHER; note = 5-methyl
  modified_base 5..6: mod_base = OTHER; note = 5-methyl
  modified_base 10..12: mod_base = OTHER; note = 5-methyl
  modified_base 9: mod_base = OTHER; note = bicyclic nucleic acid (BNA)
  modified_base 17..18: mod_base = OTHER; note = bicyclic nucleic acid (BNA)
  source 1..18: mol_type = other DNA
ctgtccaagcccggttga

SEQ ID NO: 15149 - DNA, 18 bp, synthetic construct
  misc_feature 1..18: note = Description of Artificial Sequence: Synthetic Antisense oligonucleotide
  modified_base 1: mod_base = OTHER; note = 5-methyl
  modified_base 5..6: mod_base = OTHER; note = 5-methyl
  modified_base 10..12: mod_base = OTHER; note = 5-methyl
  modified_base 10: mod_base = OTHER; note = bicyclic nucleic acid (BNA)
  modified_base 17..18: mod_base = OTHER; note = bicyclic nucleic acid (BNA)
  source 1..18: mol_type = other DNA
ctgtccaagcccggttga

SEQ ID NO: 15150 - DNA, 18 bp, synthetic construct
  misc_feature 1..18: note = Description of Artificial Sequence: Synthetic Antisense oligonucleotide
  modified_base 1: mod_base = OTHER; note = 5-methyl
  modified_base 5..6: mod_base = OTHER; note = 5-methyl
  modified_base 10..12: mod_base = OTHER; note = 5-methyl
  modified_base 5: mod_base = OTHER; note = bicyclic nucleic acid (BNA)
  modified_base 17..18: mod_base = OTHER; note = bicyclic nucleic acid (BNA)
  source 1..18: mol_type = other DNA
ctgtccaagcccggttga

SEQ ID NO: 15151 - DNA, 18 bp, synthetic construct
  misc_feature 1..18: note = Description of Artificial Sequence: Synthetic Antisense oligonucleotide
  modified_base 1: mod_base = OTHER; note = 5-methyl
  modified_base 5..6: mod_base = OTHER; note = 5-methyl
  modified_base 10..12: mod_base = OTHER; note = 5-methyl
  modified_base 11: mod_base = OTHER; note = bicyclic nucleic acid (BNA)
  modified_base 17..18: mod_base = OTHER; note = bicyclic nucleic acid (BNA)
  source 1..18: mol_type = other DNA
ctgtccaagcccggttga

SEQ ID NO: 15152 - DNA, 18 bp, synthetic construct
  misc_feature 1..18: note = Description of Artificial Sequence: Synthetic Antisense oligonucleotide
  modified_base 1: mod_base = OTHER; note = 5-methyl
  modified_base 5..6: mod_base = OTHER; note = 5-methyl
  modified_base 10..12: mod_base = OTHER; note = 5-methyl
  modified_base 6: mod_base = OTHER; note = bicyclic nucleic acid (BNA)
  modified_base 17..18: mod_base = OTHER; note = bicyclic nucleic acid (BNA)
  source 1..18: mol_type = other DNA
ctgtccaagcccggttga

SEQ ID NO: 15153 - DNA, 18 bp, synthetic construct
  misc_feature 1..18: note = Description of Artificial Sequence: Synthetic Antisense oligonucleotide
  modified_base 1: mod_base = OTHER; note = 5-methyl
  modified_base 5..6: mod_base = OTHER; note = 5-methyl
  modified_base 10..12: mod_base = OTHER; note = 5-methyl
  modified_base 12: mod_base = OTHER; note = bicyclic nucleic acid (BNA)
  modified_base 17..18: mod_base = OTHER; note = bicyclic nucleic acid (BNA)
  source 1..18: mol_type = other DNA
ctgtccaagcccggttga

SEQ ID NO: 15154 - DNA, 18 bp, synthetic construct
  misc_feature 1..18: note = Description of Artificial Sequence: Synthetic Antisense oligonucleotide
  modified_base 1: mod_base = OTHER; note = 5-methyl
  modified_base 5..6: mod_base = OTHER; note = 5-methyl
  modified_base 10..12: mod_base = OTHER; note = 5-methyl
  modified_base 13: mod_base = OTHER; note = bicyclic nucleic acid (BNA)
  modified_base 17..18: mod_base = OTHER; note = bicyclic nucleic acid (BNA)
  source 1..18: mol_type = other DNA
ctgtccaagcccggttga

SEQ ID NO: 15155 - DNA, 18 bp, synthetic construct
  misc_feature 1..18: note = Description of Artificial Sequence: Synthetic Antisense oligonucleotide
  modified_base 1: mod_base = OTHER; note = 5-methyl
  modified_base 5..6: mod_base = OTHER; note = 5-methyl
  modified_base 10..12: mod_base = OTHER; note = 5-methyl
  modified_base 14: mod_base = OTHER; note = bicyclic nucleic acid (BNA)
  modified_base 17..18: mod_base = OTHER; note = bicyclic nucleic acid (BNA)
  source 1..18: mol_type = other DNA
ctgtccaagcccggttga

SEQ ID NO: 15156 - DNA, 18 bp, synthetic construct
  misc_feature 1..18: note = Description of Artificial Sequence: Synthetic Antisense oligonucleotide
  modified_base 6: mod_base = OTHER; note = bicyclic nucleic acid (BNA)
  modified_base 11: mod_base = OTHER; note = bicyclic nucleic acid (BNA)
  modified_base 17..18: mod_base = OTHER; note = bicyclic nucleic acid (BNA)
  modified_base 9: mod_base = OTHER; note = 5-methyl
  modified_base 13..14: mod_base = OTHER; note = 5-methyl
  modified_base 18: mod_base = OTHER; note = 5-methyl
  source 1..18: mol_type = other DNA
ggtaagttctgtccaagc

SEQ ID NO: 15157 - DNA, 18 bp, synthetic construct
  misc_feature 1..18: note = Description of Artificial Sequence: Synthetic Antisense oligonucleotide
  modified_base 9: mod_base = OTHER; note = 5-methyl
  modified_base 13..14: mod_base = OTHER; note = 5-methyl
  modified_base 18: mod_base = OTHER; note = 5-methyl
  modified_base 9: mod_base = OTHER; note = bicyclic nucleic acid (BNA)
  modified_base 14: mod_base = OTHER; note = bicyclic nucleic acid (BNA)
  modified_base 17..18: mod_base = OTHER; note = bicyclic nucleic acid (BNA)
  source 1..18: mol_type = other DNA
ggtaagttctgtccaagc

SEQ ID NO: 15158 - DNA, 18 bp, synthetic construct
  misc_feature 1..18: note = Description of Artificial Sequence: Synthetic Antisense oligonucleotide
  modified_base 2: mod_base = OTHER; note = bicyclic nucleic acid (BNA)
  modified_base 13: mod_base = OTHER; note = bicyclic nucleic acid (BNA)
  modified_base 17..18: mod_base = OTHER; note = bicyclic nucleic acid (BNA)
  modified_base 9: mod_base = OTHER; note = 5-methyl
  modified_base 13..14: mod_base = OTHER; note = 5-methyl
  modified_base 18: mod_base = OTHER; note = 5-methyl
  source 1..18: mol_type = other DNA
ggtaagttctgtccaagc

SEQ ID NO: 15159 - DNA, 18 bp, synthetic construct
  misc_feature 1..18: note = Description of Artificial Sequence: Synthetic Antisense oligonucleotide
  modified_base 9: mod_base = OTHER; note = 5-methyl
  modified_base 13..14: mod_base = OTHER; note = 5-methyl
  modified_base 18: mod_base = OTHER; note = 5-methyl
  modified_base 9: mod_base = OTHER; note = bicyclic nucleic acid (BNA)
  modified_base 13: mod_base = OTHER; note = bicyclic nucleic acid (BNA)
  modified_base 17..18: mod_base = OTHER; note = bicyclic nucleic acid (BNA)
  source 1..18: mol_type = other DNA
ggtaagttctgtccaagc

SEQ ID NO: 15160 - DNA, 18 bp, synthetic construct
  misc_feature 1..18: note = Description of Artificial Sequence: Synthetic Antisense oligonucleotide
  modified_base 9: mod_base = OTHER; note = 5-methyl
  modified_base 13..14: mod_base = OTHER; note = 5-methyl
  modified_base 18: mod_base = OTHER; note = 5-methyl
  modified_base 13..14: mod_base = OTHER; note = bicyclic nucleic acid (BNA)
  modified_base 17..18: mod_base = OTHER; note = bicyclic nucleic acid (BNA)
  source 1..18: mol_type = other DNA
ggtaagttctgtccaagc

SEQ ID NO: 15161 - DNA, 18 bp, synthetic construct
  misc_feature 1..18: note = Description of Artificial Sequence: Synthetic Antisense oligonucleotide
  modified_base 2: mod_base = OTHER; note = bicyclic nucleic acid (BNA)
  modified_base 14: mod_base = OTHER; note = bicyclic nucleic acid (BNA)
  modified_base 17..18: mod_base = OTHER; note = bicyclic nucleic acid (BNA)
  modified_base 9: mod_base = OTHER; note = 5-methyl
  modified_base 13..14: mod_base = OTHER; note = 5-methyl
  modified_base 18: mod_base = OTHER; note = 5-methyl
  source 1..18: mol_type = other DNA
ggtaagttctgtccaagc

SEQ ID NO: 15162 - DNA, 18 bp, synthetic construct
  misc_feature 1..18: note = Description of Artificial Sequence: Synthetic Antisense oligonucleotide
  modified_base 9: mod_base = OTHER; note = 5-methyl
  modified_base 13..14: mod_base = OTHER; note = 5-methyl
  modified_base 18: mod_base = OTHER; note = 5-methyl
  modified_base 11: mod_base = OTHER; note = bicyclic nucleic acid (BNA)
  modified_base 14: mod_base = OTHER; note = bicyclic nucleic acid (BNA)
  modified_base 17..18: mod_base = OTHER; note = bicyclic nucleic acid (BNA)
  source 1..18: mol_type = other DNA
ggtaagttctgtccaagc

SEQ ID NO: 15163 - DNA, 18 bp, synthetic construct
  misc_feature 1..18: note = Description of Artificial Sequence: Synthetic Antisense oligonucleotide
  modified_base 6: mod_base = OTHER; note = bicyclic nucleic acid (BNA)
  modified_base 13: mod_base = OTHER; note = bicyclic nucleic acid (BNA)
  modified_base 17..18: mod_base = OTHER; note = bicyclic nucleic acid (BNA)
  modified_base 9: mod_base = OTHER; note = 5-methyl
  modified_base 13..14: mod_base = OTHER; note = 5-methyl
  modified_base 18: mod_base = OTHER; note = 5-methyl
  source 1..18: mol_type = other DNA
ggtaagttctgtccaagc

SEQ ID NO: 15164 - DNA, 18 bp, synthetic construct
  misc_feature 1..18: note = Description of Artificial Sequence: Synthetic Antisense oligonucleotide
  modified_base 6: mod_base = OTHER; note = bicyclic nucleic acid (BNA)
  modified_base 14: mod_base = OTHER; note = bicyclic nucleic acid (BNA)
  modified_base 17..18: mod_base = OTHER; note = bicyclic nucleic acid (BNA)
  modified_base 9: mod_base = OTHER; note = 5-methyl
  modified_base 13..14: mod_base = OTHER; note = 5-methyl
  modified_base 18: mod_base = OTHER; note = 5-methyl
  source 1..18: mol_type = other DNA
ggtaagttctgtccaagc

SEQ ID NO: 15165 - DNA, 18 bp, synthetic construct
  misc_feature 1..18: note = Description of Artificial Sequence: Synthetic Antisense oligonucleotide
  modified_base 9: mod_base = OTHER; note = 5-methyl
  modified_base 13..14: mod_base = OTHER; note = 5-methyl
  modified_base 18: mod_base = OTHER; note = 5-methyl
  modified_base 9: mod_base = OTHER; note = bicyclic nucleic acid (BNA)
  modified_base 11: mod_base = OTHER; note = bicyclic nucleic acid (BNA)
  modified_base 17..18: mod_base = OTHER; note = bicyclic nucleic acid (BNA)
  source 1..18: mol_type = other DNA
ggtaagttctgtccaagc

SEQ ID NO: 15166 - DNA, 18 bp, synthetic construct
  misc_feature 1..18: note = Description of Artificial Sequence: Synthetic Antisense oligonucleotide
  modified_base 9: mod_base = OTHER; note = 5-methyl
  modified_base 13..14: mod_base = OTHER; note = 5-methyl
  modified_base 18: mod_base = OTHER; note = 5-methyl
  modified_base 11: mod_base = OTHER; note = bicyclic nucleic acid (BNA)
  modified_base 13: mod_base = OTHER; note = bicyclic nucleic acid (BNA)
  modified_base 17..18: mod_base = OTHER; note = bicyclic nucleic acid (BNA)
  source 1..18: mol_type = other DNA
ggtaagttctgtccaagc

SEQ ID NO: 15167 - DNA, 18 bp, synthetic construct
  misc_feature 1..18: note = Description of Artificial Sequence: Synthetic Antisense oligonucleotide
  modified_base 2: mod_base = OTHER; note = bicyclic nucleic acid (BNA)
  modified_base 6: mod_base = OTHER; note = bicyclic nucleic acid (BNA)
  modified_base 17..18: mod_base = OTHER; note = bicyclic nucleic acid (BNA)
  modified_base 9: mod_base = OTHER; note = 5-methyl
  modified_base 13..14: mod_base = OTHER; note = 5-methyl
  modified_base 18: mod_base = OTHER; note = 5-methyl
  source 1..18: mol_type = other DNA
ggtaagttctgtccaagc

SEQ ID NO: 15168 - DNA, 18 bp, synthetic construct
  misc_feature 1..18: note = Description of Artificial Sequence: Synthetic Antisense oligonucleotide
  modified_base 2: mod_base = OTHER; note = bicyclic nucleic acid (BNA)
  modified_base 9: mod_base = OTHER; note = bicyclic nucleic acid (BNA)
  modified_base 17..18: mod_base = OTHER; note = bicyclic nucleic acid (BNA)
  modified_base 9: mod_base = OTHER; note = 5-methyl
  modified_base 13..14: mod_base = OTHER; note = 5-methyl
  modified_base 18: mod_base = OTHER; note = 5-methyl
  source 1..18: mol_type = other DNA
ggtaagttctgtccaagc

SEQ ID NO: 15169 - DNA, 18 bp, synthetic construct
  misc_feature 1..18: note = Description of Artificial Sequence: Synthetic Antisense oligonucleotide
  modified_base 2: mod_base = OTHER; note = bicyclic nucleic acid (BNA)
  modified_base 11: mod_base = OTHER; note = bicyclic nucleic acid (BNA)
  modified_base 17..18: mod_base = OTHER; note = bicyclic nucleic acid (BNA)
  modified_base 9: mod_base = OTHER; note = 5-methyl
  modified_base 13..14: mod_base = OTHER; note = 5-methyl
  modified_base 18: mod_base = OTHER; note = 5-methyl
  source 1..18: mol_type = other DNA
ggtaagttctgtccaagc

SEQ ID NO: 15170 - DNA, 18 bp, synthetic construct
  misc_feature 1..18: note = Description of Artificial Sequence: Synthetic Antisense oligonucleotide
  modified_base 6: mod_base = OTHER; note = bicyclic nucleic acid (BNA)
  modified_base 9: mod_base = OTHER; note = bicyclic nucleic acid (BNA)
  modified_base 17..18: mod_base = OTHER; note = bicyclic nucleic acid (BNA)
  modified_base 9: mod_base = OTHER; note = 5-methyl
  modified_base 13..14: mod_base = OTHER; note = 5-methyl
  modified_base 18: mod_base = OTHER; note = 5-methyl
  source 1..18: mol_type = other DNA
ggtaagttctgtccaagc

SEQ ID NO: 15171 - DNA, 18 bp, synthetic construct
  misc_feature 1..18: note = Description of Artificial Sequence: Synthetic Antisense oligonucleotide
  modified_base 5: mod_base = OTHER; note = bicyclic nucleic acid (BNA)
  modified_base 8: mod_base = OTHER; note = bicyclic nucleic acid (BNA)
  modified_base 17..18: mod_base = OTHER; note = bicyclic nucleic acid (BNA)
  modified_base 8: mod_base = OTHER; note = 5-methyl
  modified_base 12..13: mod_base = OTHER; note = 5-methyl
  modified_base 17..18: mod_base = OTHER; note = 5-methyl
  source 1..18: mol_type = other DNA
gtaagttctgtccaagcc

SEQ ID NO: 15172 - DNA, 18 bp, synthetic construct
  misc_feature 1..18: note = Description of Artificial Sequence: Synthetic Antisense oligonucleotide
  modified_base 8: mod_base = OTHER; note = 5-methyl
  modified_base 12..13: mod_base = OTHER; note = 5-methyl
  modified_base 17..18: mod_base = OTHER; note = 5-methyl
  modified_base 13: mod_base = OTHER; note = bicyclic nucleic acid (BNA)
  modified_base 16..18: mod_base = OTHER; note = bicyclic nucleic acid (BNA)
  source 1..18: mol_type = other DNA
gtaagttctgtccaagcc

SEQ ID NO: 15173 - DNA, 18 bp, synthetic construct
  misc_feature 1..18: note = Description of Artificial Sequence: Synthetic Antisense oligonucleotide
  modified_base 5: mod_base = OTHER; note = bicyclic nucleic acid (BNA)
  modified_base 10: mod_base = OTHER; note = bicyclic nucleic acid (BNA)
  modified_base 17..18: mod_base = OTHER; note = bicyclic nucleic acid (BNA)
  modified_base 8: mod_base = OTHER; note = 5-methyl
  modified_base 12..13: mod_base = OTHER; note = 5-methyl
  modified_base 17..18: mod_base = OTHER; note = 5-methyl
  source 1..18: mol_type = other DNA
gtaagttctgtccaagcc

SEQ ID NO: 15174 - DNA, 18 bp, synthetic construct
  misc_feature 1..18: note = Description of Artificial Sequence: Synthetic Antisense oligonucleotide
  modified_base 8: mod_base = OTHER; note = 5-methyl
  modified_base 12..13: mod_base = OTHER; note = 5-methyl
  modified_base 17..18: mod_base = OTHER; note = 5-methyl
  modified_base 8: mod_base = OTHER; note = bicyclic nucleic acid (BNA)
  modified_base 16..18: mod_base = OTHER; note = bicyclic nucleic acid (BNA)
  source 1..18: mol_type = other DNA
gtaagttctgtccaagcc

SEQ ID NO: 15175 - DNA, 18 bp, synthetic construct
  misc_feature 1..18: note = Description of Artificial Sequence: Synthetic Antisense oligonucleotide
  modified_base 8: mod_base = OTHER; note = 5-methyl
  modified_base 12..13: mod_base = OTHER; note = 5-methyl
  modified_base 17..18: mod_base = OTHER; note = 5-methyl
  modified_base 10: mod_base = OTHER; note = bicyclic nucleic acid (BNA)
  modified_base 16..18: mod_base = OTHER; note = bicyclic nucleic acid (BNA)
  source 1..18: mol_type = other DNA
gtaagttctgtccaagcc

SEQ ID NO: 15176 - DNA, 18 bp, synthetic construct
  misc_feature 1..18: note = Description of Artificial Sequence: Synthetic Antisense oligonucleotide
  modified_base 8: mod_base = OTHER; note = 5-methyl
  modified_base 12..13: mod_base = OTHER; note = 5-methyl
  modified_base 17..18: mod_base = OTHER; note = 5-methyl
  modified_base 8: mod_base = OTHER; note = bicyclic nucleic acid (BNA)
  modified_base 13: mod_base = OTHER; note = bicyclic nucleic acid (BNA)
  modified_base 17..18: mod_base = OTHER; note = bicyclic nucleic acid (BNA)
  source 1..18: mol_type = other DNA
gtaagttctgtccaagcc

SEQ ID NO: 15177 - DNA, 18 bp, synthetic construct
  misc_feature 1..18: note = Description of Artificial Sequence: Synthetic Antisense oligonucleotide
  modified_base 5: mod_base = OTHER; note = bicyclic nucleic acid (BNA)
  modified_base 16..18: mod_base = OTHER; note = bicyclic nucleic acid (BNA)
  modified_base 8: mod_base = OTHER; note = 5-methyl
  modified_base 12..13: mod_base = OTHER; note = 5-methyl
  modified_base 17..18: mod_base = OTHER; note = 5-methyl
  source 1..18: mol_type = other DNA
gtaagttctgtccaagcc

SEQ ID NO: 15178 - DNA, 18 bp, synthetic construct
  misc_feature 1..18: note = Description of Artificial Sequence: Synthetic Antisense oligonucleotide
  modified_base 8: mod_base = OTHER; note = 5-methyl
  modified_base 12..13: mod_base = OTHER; note = 5-methyl
  modified_base 17..18: mod_base = OTHER; note = 5-methyl
  modified_base 10: mod_base = OTHER; note = bicyclic nucleic acid (BNA)
  modified_base 13: mod_base = OTHER; note = bicyclic nucleic acid (BNA)
  modified_base 17..18: mod_base = OTHER; note = bicyclic nucleic acid (BNA)
  source 1..18: mol_type = other DNA
gtaagttctgtccaagcc

SEQ ID NO: 15179 - DNA, 18 bp, synthetic construct
  misc_feature 1..18: note = Description of Artificial Sequence: Synthetic Antisense oligonucleotide
  modified_base 5: mod_base = OTHER; note = bicyclic nucleic acid (BNA)
  modified_base 13: mod_base = OTHER; note = bicyclic nucleic acid (BNA)
  modified_base 17..18: mod_base = OTHER; note = bicyclic nucleic acid (BNA)
  modified_base 8: mod_base = OTHER; note = 5-methyl
  modified_base 12..13: mod_base = OTHER; note = 5-methyl
  modified_base 17..18: mod_base = OTHER; note = 5-methyl
  source 1..18: mol_type = other DNA
gtaagttctgtccaagcc

SEQ ID NO: 15180 - DNA, 18 bp, synthetic construct
  misc_feature 1..18: note = Description of Artificial Sequence: Synthetic Antisense oligonucleotide
  modified_base 8: mod_base = OTHER; note = 5-methyl
  modified_base 12..13: mod_base = OTHER; note = 5-methyl
  modified_base 17..18: mod_base = OTHER; note = 5-methyl
  modified_base 10: mod_base = OTHER; note = bicyclic nucleic acid (BNA)
  modified_base 12: mod_base = OTHER; note = bicyclic nucleic acid (BNA)
  modified_base 17..18: mod_base = OTHER; note = bicyclic nucleic acid (BNA)
  source 1..18: mol_type = other DNA
gtaagttctgtccaagcc

SEQ ID NO: 15181 - DNA, 18 bp, synthetic construct
  misc_feature 1..18: note = Description of Artificial Sequence: Synthetic Antisense oligonucleotide
  modified_base 8: mod_base = OTHER; note = 5-methyl
  modified_base 12..13: mod_base = OTHER; note = 5-methyl
  modified_base 17..18: mod_base = OTHER; note = 5-methyl
  modified_base 8: mod_base = OTHER; note = bicyclic nucleic acid (BNA)
  modified_base 12: mod_base = OTHER; note = bicyclic nucleic acid (BNA)
  modified_base 17..18: mod_base = OTHER; note = bicyclic nucleic acid (BNA)
  source 1..18: mol_type = other DNA
gtaagttctgtccaagcc

SEQ ID NO: 15182 - DNA, 18 bp, synthetic construct
  misc_feature 1..18: note = Description of Artificial Sequence: Synthetic Antisense oligonucleotide
  modified_base 8: mod_base = OTHER; note = 5-methyl
  modified_base 12..13: mod_base = OTHER; note = 5-methyl
  modified_base 17..18: mod_base = OTHER; note = 5-methyl
  modified_base 12: mod_base = OTHER; note = bicyclic nucleic acid (BNA)
  modified_base 16..18: mod_base = OTHER; note = bicyclic nucleic acid (BNA)
  source 1..18: mol_type = other DNA
gtaagttctgtccaagcc

SEQ ID NO: 15183 - DNA, 18 bp, synthetic construct
  misc_feature 1..18: note = Description of Artificial Sequence: Synthetic Antisense oligonucleotide
  modified_base 8: mod_base = OTHER; note = 5-methyl
  modified_base 12..13: mod_base = OTHER; note = 5-methyl
  modified_base 17..18: mod_base = OTHER; note = 5-methyl
  modified_base 12..13: mod_base = OTHER; note = bicyclic nucleic acid (BNA)
  modified_base 17..18: mod_base = OTHER; note = bicyclic nucleic acid (BNA)
  source 1..18: mol_type = other DNA
gtaagttctgtccaagcc

SEQ ID NO: 15184 - DNA, 18 bp, synthetic construct
  misc_feature 1..18: note = Description of Artificial Sequence: Synthetic Antisense oligonucleotide
  modified_base 5: mod_base = OTHER; note = bicyclic nucleic acid (BNA)
  modified_base 12: mod_base = OTHER; note = bicyclic nucleic acid (BNA)
  modified_base 17..18: mod_base = OTHER; note = bicyclic nucleic acid (BNA)
  modified_base 8: mod_base = OTHER; note = 5-methyl
  modified_base 12..13: mod_base = OTHER; note = 5-methyl
  modified_base 17..18: mod_base = OTHER; note = 5-methyl
  source 1..18: mol_type = other DNA
gtaagttctgtccaagcc

SEQ ID NO: 15185 - DNA, 18 bp, synthetic construct
  misc_feature 1..18: note = Description of Artificial Sequence: Synthetic Antisense oligonucleotide
  modified_base 8: mod_base = OTHER; note = 5-methyl
  modified_base 12..13: mod_base = OTHER; note = 5-methyl
  modified_base 17..18: mod_base = OTHER; note = 5-methyl
  modified_base 8: mod_base = OTHER; note = bicyclic nucleic acid (BNA)
  modified_base 10: mod_base = OTHER; note = bicyclic nucleic acid (BNA)
  modified_base 17..18: mod_base = OTHER; note = bicyclic nucleic acid (BNA)
  source 1..18: mol_type = other DNA
gtaagttctgtccaagcc

SEQ ID NO: 15186 - DNA, 18 bp, synthetic construct
  misc_feature 1..18: note = Description of Artificial Sequence: Synthetic Antisense oligonucleotide
  modified_base 4: mod_base = OTHER; note = 5-methyl
  modified_base 13: mod_base = OTHER; note = 5-methyl
  modified_base 17..18: mod_base = OTHER; note = 5-methyl
  modified_base 6: mod_base = OTHER; note = bicyclic nucleic acid (BNA)
  modified_base 10: mod_base = OTHER; note = bicyclic nucleic acid (BNA)
  modified_base 17..18: mod_base = OTHER; note = bicyclic nucleic acid (BNA)
  source 1..18: mol_type = other DNA
agtcggtaagttctgtcc

SEQ ID NO: 15187 - DNA, 18 bp, synthetic construct
  misc_feature 1..18: note = Description of Artificial Sequence: Synthetic Antisense oligonucleotide
  modified_base 2: mod_base = OTHER; note = bicyclic nucleic acid (BNA)
  modified_base 4: mod_base = OTHER; note = bicyclic nucleic acid (BNA)
  modified_base 17..18: mod_base = OTHER; note = bicyclic nucleic acid (BNA)
  modified_base 4: mod_base = OTHER; note = 5-methyl
  modified_base 13: mod_base = OTHER; note = 5-methyl
  modified_base 17..18: mod_base = OTHER; note = 5-methyl
  source 1..18: mol_type = other DNA
agtcggtaagttctgtcc

SEQ ID NO: 15188 - DNA, 18 bp, synthetic construct
  misc_feature 1..18: note = Description of Artificial Sequence: Synthetic Antisense oligonucleotide
  modified_base 4: mod_base = OTHER; note = 5-methyl
  modified_base 13: mod_base = OTHER; note = 5-methyl
  modified_base 17..18: mod_base = OTHER; note = 5-methyl
  modified_base 5: mod_base = OTHER; note = bicyclic nucleic acid (BNA)
  modified_base 13: mod_base = OTHER; note = bicyclic nucleic acid (BNA)
  modified_base 17..18: mod_base = OTHER; note = bicyclic nucleic acid (BNA)
  source 1..18: mol_type = other DNA
agtcggtaagttctgtcc

SEQ ID NO: 15189 - DNA, 18 bp, synthetic construct
  misc_feature 1..18: note = Description of Artificial Sequence: Synthetic Antisense oligonucleotide
  modified_base 4: mod_base = OTHER; note = 5-methyl
  modified_base 13: mod_base = OTHER; note = 5-methyl
  modified_base 17..18: mod_base = OTHER; note = 5-methyl
  modified_base 4: mod_base = OTHER; note = bicyclic nucleic acid (BNA)
  modified_base 15: mod_base = OTHER; note = bicyclic nucleic acid (BNA)
  modified_base 17..18: mod_base = OTHER; note = bicyclic nucleic acid (BNA)
  source 1..18: mol_type = other DNA
agtcggtaagttctgtcc

SEQ ID NO: 15190 - DNA, 18 bp, synthetic construct
  misc_feature 1..18: note = Description of Artificial Sequence: Synthetic Antisense oligonucleotide
  modified_base 4: mod_base = OTHER; note = 5-methyl
  modified_base 13: mod_base = OTHER; note = 5-methyl
  modified_base 17..18: mod_base = OTHER; note = 5-methyl
  modified_base 5: mod_base = OTHER; note = bicyclic nucleic acid (BNA)
  modified_base 10: mod_base = OTHER; note = bicyclic nucleic acid (BNA)
  modified_base 17..18: mod_base = OTHER; note = bicyclic nucleic acid (BNA)
  source 1..18: mol_type = other DNA
agtcggtaagttctgtcc

SEQ ID NO: 15191 - DNA, 18 bp, synthetic construct
  misc_feature 1..18: note = Description of Artificial Sequence: Synthetic Antisense oligonucleotide
  modified_base 4: mod_base = OTHER; note = 5-methyl
  modified_base 13: mod_base = OTHER; note = 5-methyl
  modified_base 17..18: mod_base = OTHER; note = 5-methyl
  modified_base 6: mod_base = OTHER; note = bicyclic nucleic acid (BNA)
  modified_base 13: mod_base = OTHER; note = bicyclic nucleic acid (BNA)
  modified_base 17..18: mod_base = OTHER; note = bicyclic nucleic acid (BNA)
  source 1..18: mol_type = other DNA
agtcggtaagttctgtcc

SEQ ID NO: 15192 - DNA, 18 bp, synthetic construct
  misc_feature 1..18: note = Description of Artificial Sequence: Synthetic Antisense oligonucleotide
  modified_base 2: mod_base = OTHER; note = bicyclic nucleic acid (BNA)
  modified_base 15: mod_base = OTHER; note = bicyclic nucleic acid (BNA)
  modified_base 17..18: mod_base = OTHER; note = bicyclic nucleic acid (BNA)
  modified_base 4: mod_base = OTHER; note = 5-methyl
  modified_base 13: mod_base = OTHER; note = 5-methyl
  modified_base 17..18: mod_base = OTHER; note = 5-methyl
  source 1..18: mol_type = other DNA
agtcggtaagttctgtcc

SEQ ID NO: 15193 - DNA, 18 bp, synthetic construct
  misc_feature 1..18: note = Description of Artificial Sequence: Synthetic Antisense oligonucleotide
  modified_base 2: mod_base = OTHER; note = bicyclic nucleic acid (BNA)
  modified_base 6: mod_base = OTHER; note = bicyclic nucleic acid (BNA)
  modified_base 17..18: mod_base = OTHER; note = bicyclic nucleic acid (BNA)
  modified_base 4: mod_base = OTHER; note = 5-methyl
  modified_base 13: mod_base = OTHER; note = 5-methyl
  modified_base 17..18: mod_base = OTHER; note = 5-methyl
  source 1..18: mol_type = other DNA
agtcggtaagttctgtcc

SEQ ID NO: 15194 - DNA, 18 bp, synthetic construct
  misc_feature 1..18: note = Description of Artificial Sequence: Synthetic Antisense oligonucleotide
  modified_base 4: mod_base = OTHER; note = 5-methyl
  modified_base 13: mod_base = OTHER; note = 5-methyl
  modified_base 17..18: mod_base = OTHER; note = 5-methyl
  modified_base 10: mod_base = OTHER; note = bicyclic nucleic acid (BNA)
  modified_base 15: mod_base = OTHER; note = bicyclic nucleic acid (BNA)
  modified_base 17..18: mod_base = OTHER; note = bicyclic nucleic acid (BNA)
  source 1..18: mol_type = other DNA
agtcggtaagttctgtcc

SEQ ID NO: 15195 - DNA, 18 bp, synthetic construct
  misc_feature 1..18: note = Description of Artificial Sequence: Synthetic Antisense oligonucleotide
  modified_base 4: mod_base = OTHER; note = 5-methyl
  modified_base 13: mod_base = OTHER; note = 5-methyl
  modified_base 17..18: mod_base = OTHER; note = 5-methyl
  modified_base 13: mod_base = OTHER; note = bicyclic nucleic acid (BNA)
  modified_base 15: mod_base = OTHER; note = bicyclic nucleic acid (BNA)
  modified_base 17..18: mod_base = OTHER; note = bicyclic nucleic acid (BNA)
  source 1..18: mol_type = other DNA
agtcggtaagttctgtcc

SEQ ID NO: 15196 - DNA, 18 bp, synthetic construct
  misc_feature 1..18: note = Description of Artificial Sequence: Synthetic Antisense oligonucleotide
  modified_base 4: mod_base = OTHER; note = 5-methyl
  modified_base 13: mod_base = OTHER; note = 5-methyl
  modified_base 17..18: mod_base = OTHER; note = 5-methyl
  modified_base 5..6: mod_base = OTHER; note = bicyclic nucleic acid (BNA)
  modified_base 17..18: mod_base = OTHER; note = bicyclic nucleic acid (BNA)
  source 1..18: mol_type = other DNA
agtcggtaagttctgtcc

SEQ ID NO: 15197 - DNA, 18 bp, synthetic construct
  misc_feature 1..18: note = Description of Artificial Sequence: Synthetic Antisense oligonucleotide
  modified_base 4: mod_base = OTHER; note = 5-methyl
  modified_base 13: mod_base = OTHER; note = 5-methyl
  modified_base 17..18: mod_base = OTHER; note = 5-methyl
  modified_base 5: mod_base = OTHER; note = bicyclic nucleic acid (BNA)
  modified_base 15: mod_base = OTHER; note = bicyclic nucleic acid (BNA)
  modified_base 17..18: mod_base = OTHER; note = bicyclic nucleic acid (BNA)
  source 1..18: mol_type = other DNA
agtcggtaagttctgtcc

SEQ ID NO: 15198 - DNA, 18 bp, synthetic construct
  misc_feature 1..18: note = Description of Artificial Sequence: Synthetic Antisense oligonucleotide
  modified_base 2: mod_base = OTHER; note = bicyclic nucleic acid (BNA)
  modified_base 5: mod_base = OTHER; note = bicyclic nucleic acid (BNA)
  modified_base 17..18: mod_base = OTHER; note = bicyclic nucleic acid (BNA)
  modified_base 4: mod_base = OTHER; note = 5-methyl
  modified_base 13: mod_base = OTHER; note = 5-methyl
  modified_base 17..18: mod_base = OTHER; note = 5-methyl
  source 1..18: mol_type = other DNA
agtcggtaagttctgtcc

SEQ ID NO: 15199 - DNA, 18 bp, synthetic construct
  misc_feature 1..18: note = Description of Artificial Sequence: Synthetic Antisense oligonucleotide
  modified_base 4: mod_base = OTHER; note = 5-methyl
  modified_base 13: mod_base = OTHER; note = 5-methyl
  modified_base 17..18: mod_base = OTHER; note = 5-methyl
  modified_base 4: mod_base = OTHER; note = bicyclic nucleic acid (BNA)
  modified_base 10: mod_base = OTHER; note = bicyclic nucleic acid (BNA)
  modified_base 17..18: mod_base = OTHER; note = bicyclic nucleic acid (BNA)
  source 1..18: mol_type = other DNA
agtcggtaagttctgtcc

SEQ ID NO: 15200 - DNA, 18 bp, synthetic construct
  misc_feature 1..18: note = Description of Artificial Sequence: Synthetic Antisense oligonucleotide
  modified_base 2: mod_base = OTHER; note = bicyclic nucleic acid (BNA)
  modified_base 10: mod_base = OTHER; note = bicyclic nucleic acid (BNA)
  modified_base 17..18: mod_base = OTHER; note = bicyclic nucleic acid (BNA)
  modified_base 4: mod_base = OTHER; note = 5-methyl
  modified_base 13: mod_base = OTHER; note = 5-methyl
  modified_base 17..18: mod_base = OTHER; note = 5-methyl
  source 1..18: mol_type = other DNA
agtcggtaagttctgtcc

SEQ ID NO: 15201 - DNA, 18 bp, synthetic construct
  misc_feature 1..18: note = Description of Artificial Sequence: Synthetic Antisense oligonucleotide
  modified_base 4: mod_base = OTHER; note = 5-methyl
  modified_base 13: mod_base = OTHER; note = 5-methyl
  modified_base 17..18: mod_base = OTHER; note = 5-methyl
  modified_base 4: mod_base = OTHER; note = bicyclic nucleic acid (BNA)
  modified_base 6: mod_base = OTHER; note = bicyclic nucleic acid (BNA)
  modified_base 17..18: mod_base = OTHER; note = bicyclic nucleic acid (BNA)
  source 1..18: mol_type = other DNA
agtcggtaagttctgtcc

SEQ ID NO: 15202 - DNA, 18 bp, synthetic construct
  misc_feature 1..18: note = Description of Artificial Sequence: Synthetic Antisense oligonucleotide
  modified_base 4: mod_base = OTHER; note = 5-methyl
  modified_base 13: mod_base = OTHER; note = 5-methyl
  modified_base 17..18: mod_base = OTHER; note = 5-methyl
  modified_base 4: mod_base = OTHER; note = bicyclic nucleic acid (BNA)
  modified_base 13: mod_base = OTHER; note = bicyclic nucleic acid (BNA)
  modified_base 17..18: mod_base = OTHER; note = bicyclic nucleic acid (BNA)
  source 1..18: mol_type = other DNA
agtcggtaagttctgtcc

SEQ ID NO: 15203 - DNA, 18 bp, synthetic construct
  misc_feature 1..18: note = Description of Artificial Sequence: Synthetic Antisense oligonucleotide
  modified_base 2: mod_base = OTHER; note = bicyclic nucleic acid (BNA)
  modified_base 13: mod_base = OTHER; note = bicyclic nucleic acid (BNA)
  modified_base 17..18: mod_base = OTHER; note = bicyclic nucleic acid (BNA)
  modified_base 4: mod_base = OTHER; note = 5-methyl
  modified_base 13: mod_base = OTHER; note = 5-methyl
  modified_base 17..18: mod_base = OTHER; note = 5-methyl
  source 1..18: mol_type = other DNA
agtcggtaagttctgtcc

SEQ ID NO: 15204 - DNA, 18 bp, synthetic construct
  misc_feature 1..18: note = Description of Artificial Sequence: Synthetic Antisense oligonucleotide
  modified_base 4: mod_base = OTHER; note = 5-methyl
  modified_base 13: mod_base = OTHER; note = 5-methyl
  modified_base 17..18: mod_base = OTHER; note = 5-methyl
  modified_base 6: mod_base = OTHER; note = bicyclic nucleic acid (BNA)
  modified_base 15: mod_base = OTHER; note = bicyclic nucleic acid (BNA)
  modified_base 17..18: mod_base = OTHER; note = bicyclic nucleic acid (BNA)
  source 1..18: mol_type = other DNA
agtcggtaagttctgtcc

SEQ ID NO: 15205 - DNA, 18 bp, synthetic construct
  misc_feature 1..18: note = Description of Artificial Sequence: Synthetic Antisense oligonucleotide
  modified_base 4: mod_base = OTHER; note = 5-methyl
  modified_base 13: mod_base = OTHER; note = 5-methyl
  modified_base 17..18: mod_base = OTHER; note = 5-methyl
  modified_base 4..5: mod_base = OTHER; note = bicyclic nucleic acid (BNA)
  modified_base 17..18: mod_base = OTHER; note = bicyclic nucleic acid (BNA)
  source 1..18: mol_type = other DNA
agtcggtaagttctgtcc

SEQ ID NO: 15206 - DNA, 18 bp, synthetic construct
  misc_feature 1..18: note = Description of Artificial Sequence: Synthetic Antisense oligonucleotide
  modified_base 4: mod_base = OTHER; note = 5-methyl
  modified_base 13: mod_base = OTHER; note = 5-methyl
  modified_base 17..18: mod_base = OTHER; note = 5-methyl
  modified_base 10: mod_base = OTHER; note = bicyclic nucleic acid (BNA)
  modified_base 13: mod_base = OTHER; note = bicyclic nucleic acid (BNA)
  modified_base 17..18: mod_base = OTHER; note = bicyclic nucleic acid (BNA)
  source 1..18: mol_type = other DNA
agtcggtaagttctgtcc

SEQ ID NO: 15207 - DNA, 18 bp, synthetic construct
  misc_feature 1..18: note = Description of Artificial Sequence: Synthetic Antisense oligonucleotide
  modified_base 1: mod_base = OTHER; note = 5-methyl
  modified_base 5..6: mod_base = OTHER; note = 5-methyl
  modified_base 10..12: mod_base = OTHER; note = 5-methyl
  modified_base 6: mod_base = OTHER; note = bicyclic nucleic acid (BNA)
  modified_base 10: mod_base = OTHER; note = bicyclic nucleic acid (BNA)
  modified_base 17..18: mod_base = OTHER; note = bicyclic nucleic acid (BNA)
  source 1..18: mol_type = other DNA
ctgtccaagcccggttga

SEQ ID NO: 15208 - DNA, 18 bp, synthetic construct
  misc_feature 1..18: note = Description of Artificial Sequence: Synthetic Antisense oligonucleotide
  modified_base 1: mod_base = OTHER; note = 5-methyl
  modified_base 5..6: mod_base = OTHER; note = 5-methyl
  modified_base 10..12: mod_base = OTHER; note = 5-methyl
  modified_base 9: mod_base = OTHER; note = bicyclic nucleic acid (BNA)
  modified_base 14: mod_base = OTHER; note = bicyclic nucleic acid (BNA)
  modified_base 17..18: mod_base = OTHER; note = bicyclic nucleic acid (BNA)
  source 1..18: mol_type = other DNA
ctgtccaagcccggttga

SEQ ID NO: 15209 - DNA, 18 bp, synthetic construct
  misc_feature 1..18: note = Description of Artificial Sequence: Synthetic Antisense oligonucleotide
  modified_base 1: mod_base = OTHER; note = 5-methyl
  modified_base 5..6: mod_base = OTHER; note = 5-methyl
  modified_base 10..12: mod_base = OTHER; note = 5-methyl
  modified_base 11..12: mod_base = OTHER; note = bicyclic nucleic acid (BNA)
  modified_base 17..18: mod_base = OTHER; note = bicyclic nucleic acid (BNA)
  source 1..18: mol_type = other DNA
ctgtccaagcccggttga

SEQ ID NO: 15210 - DNA, 18 bp, synthetic construct
  misc_feature 1..18: note = Description of Artificial Sequence: Synthetic Antisense oligonucleotide
  modified_base 1: mod_base = OTHER; note = 5-methyl
  modified_base 5..6: mod_base = OTHER; note = 5-methyl
  modified_base 10..12: mod_base = OTHER; note = 5-methyl
  modified_base 5: mod_base = OTHER; note = bicyclic nucleic acid (BNA)
  modified_base 9: mod_base = OTHER; note = bicyclic nucleic acid (BNA)
  modified_base 17..18: mod_base = OTHER; note = bicyclic nucleic acid (BNA)
  source 1..18: mol_type = other DNA
ctgtccaagcccggttga

SEQ ID NO: 15211 - DNA, 18 bp, synthetic construct
  misc_feature 1..18: note = Description of Artificial Sequence: Synthetic Antisense oligonucleotide
  modified_base 1: mod_base = OTHER; note = 5-methyl
  modified_base 5..6: mod_base = OTHER; note = 5-methyl
  modified_base 10..12: mod_base = OTHER; note = 5-methyl
  modified_base 3: mod_base = OTHER; note = bicyclic nucleic acid (BNA)
  modified_base 9: mod_base = OTHER; note = bicyclic nucleic acid (BNA)
  modified_base 17..18: mod_base = OTHER; note = bicyclic nucleic acid (BNA)
  source 1..18: mol_type = other DNA
ctgtccaagcccggttga

SEQ ID NO: 15212 - DNA, 18 bp, synthetic construct
  misc_feature 1..18: note = Description of Artificial Sequence: Synthetic Antisense oligonucleotide
  modified_base 1: mod_base = OTHER; note = 5-methyl
  modified_base 5..6: mod_base = OTHER; note = 5-methyl
  modified_base 10..12: mod_base = OTHER; note = 5-methyl
  modified_base 6: mod_base = OTHER; note = bicyclic nucleic acid (BNA)
  modified_base 14: mod_base = OTHER; note = bicyclic nucleic acid (BNA)
  modified_base 17..18: mod_base = OTHER; note = bicyclic nucleic acid (BNA)
  source 1..18: mol_type = other DNA
ctgtccaagcccggttga

SEQ ID NO: 15213 - DNA, 18 bp, synthetic construct
  misc_feature 1..18: note = Description of Artificial Sequence: Synthetic Antisense oligonucleotide
  modified_base 1: mod_base = OTHER; note = 5-methyl
  modified_base 5..6: mod_base = OTHER; note = 5-methyl
  modified_base 10..12: mod_base = OTHER; note = 5-methyl
  modified_base 9..10: mod_base = OTHER; note = bicyclic nucleic acid (BNA)
  modified_base 17..18: mod_base = OTHER; note = bicyclic nucleic acid (BNA)
  source 1..18: mol_type = other DNA
ctgtccaagcccggttga

SEQ ID NO: 15214 - DNA, 18 bp, synthetic construct
  misc_feature 1..18: note = Description of Artificial Sequence: Synthetic Antisense oligonucleotide
  modified_base 1: mod_base = OTHER; note = 5-methyl
  modified_base 5..6: mod_base = OTHER; note = 5-methyl
  modified_base 10..12: mod_base = OTHER; note = 5-methyl
  modified_base 5: mod_base = OTHER; note = bicyclic nucleic acid (BNA)
  modified_base 13: mod_base = OTHER; note = bicyclic nucleic acid (BNA)
  modified_base 17..18: mod_base = OTHER; note = bicyclic nucleic acid (BNA)
  source 1..18: mol_type = other DNA
ctgtccaagcccggttga

SEQ ID NO: 15215 - DNA, 18 bp, synthetic construct
  misc_feature 1..18: note = Description of Artificial Sequence: Synthetic Antisense oligonucleotide
  modified_base 1: mod_base = OTHER; note = 5-methyl
  modified_base 5..6: mod_base = OTHER; note = 5-methyl
  modified_base 10..12: mod_base = OTHER; note = 5-methyl
  modified_base 3: mod_base = OTHER; note = bicyclic nucleic acid (BNA)
  modified_base 13: mod_base = OTHER; note = bicyclic nucleic acid (BNA)
  modified_base 17..18: mod_base = OTHER; note = bicyclic nucleic acid (BNA)
  source 1..18: mol_type = other DNA
ctgtccaagcccggttga

SEQ ID NO: 15216 - DNA, 18 bp, synthetic construct
  misc_feature 1..18: note = Description of Artificial Sequence: Synthetic Antisense oligonucleotide
  modified_base 1: mod_base = OTHER; note = 5-methyl
  modified_base 5..6: mod_base = OTHER; note = 5-methyl
  modified_base 10..12: mod_base = OTHER; note = 5-methyl
  modified_base 3: mod_base = OTHER; note = bicyclic nucleic acid (BNA)
  modified_base 6: mod_base = OTHER; note = bicyclic nucleic acid (BNA)
  modified_base 17..18: mod_base = OTHER; note = bicyclic nucleic acid (BNA)
  source 1..18: mol_type = other DNA
ctgtccaagcccggttga

SEQ ID NO: 15217 - DNA, 18 bp, synthetic construct
  misc_feature 1..18: note = Description of Artificial Sequence: Synthetic Antisense oligonucleotide
  modified_base 1: mod_base = OTHER; note = 5-methyl
  modified_base 5..6: mod_base = OTHER; note = 5-methyl
  modified_base 10..12: mod_base = OTHER; note = 5-methyl
  modified_base 6: mod_base = OTHER; note = bicyclic nucleic acid (BNA)
  modified_base 9: mod_base = OTHER; note = bicyclic nucleic acid (BNA)
  modified_base 17..18: mod_base = OTHER; note = bicyclic nucleic acid (BNA)
  source 1..18: mol_type = other DNA
ctgtccaagcccggttga

SEQ ID NO: 15218 - DNA, 18 bp, synthetic construct
  misc_feature 1..18: note = Description of Artificial Sequence: Synthetic Antisense oligonucleotide
  modified_base 1: mod_base = OTHER; note = 5-methyl
  modified_base 5..6: mod_base = OTHER; note = 5-methyl
  modified_base 10..12: mod_base = OTHER; note = 5-methyl
  modified_base 5: mod_base = OTHER; note = bicyclic nucleic acid (BNA)
  modified_base 10: mod_base = OTHER; note = bicyclic nucleic acid (BNA)
  modified_base 17..18: mod_base = OTHER; note = bicyclic nucleic acid (BNA)
  source 1..18: mol_type = other DNA
ctgtccaagcccggttga

SEQ ID NO: 15219 - DNA, 18 bp, synthetic construct
  misc_feature 1..18: note = Description of Artificial Sequence: Synthetic Antisense oligonucleotide
  modified_base 1: mod_base = OTHER; note = 5-methyl
  modified_base 5..6: mod_base = OTHER; note = 5-methyl
  modified_base 10..12: mod_base = OTHER; note = 5-methyl
  modified_base 3: mod_base = OTHER; note = bicyclic nucleic acid (BNA)
  modified_base 10: mod_base = OTHER; note = bicyclic nucleic acid (BNA)
  modified_base 17..18: mod_base = OTHER; note = bicyclic nucleic acid (BNA)
  source 1..18: mol_type = other DNA
ctgtccaagcccggttga

SEQ ID NO: 15220 - DNA, 18 bp, synthetic construct
  misc_feature 1..18: note = Description of Artificial Sequence: Synthetic Antisense oligonucleotide
  modified_base 1: mod_base = OTHER; note = 5-methyl
  modified_base 5..6: mod_base = OTHER; note = 5-methyl
  modified_base 10..12: mod_base = OTHER; note = 5-methyl
  modified_base 13..14: mod_base = OTHER; note = bicyclic nucleic acid (BNA)
  modified_base 17..18: mod_base = OTHER; note = bicyclic nucleic acid (BNA)
  source 1..18: mol_type = other DNA
ctgtccaagcccggttga

SEQ ID NO: 15221 - DNA, 18 bp, synthetic construct
  misc_feature 1..18: note = Description of Artificial Sequence: Synthetic Antisense oligonucleotide
  modified_base 1: mod_base = OTHER; note = 5-methyl
  modified_base 5..6: mod_base = OTHER; note = 5-methyl
  modified_base 10..12: mod_base = OTHER; note = 5-methyl
  modified_base 6: mod_base = OTHER; note = bicyclic nucleic acid (BNA)
  modified_base 13: mod_base = OTHER; note = bicyclic nucleic acid (BNA)
  modified_base 17..18: mod_base = OTHER; note = bicyclic nucleic acid (BNA)
  source 1..18: mol_type = other DNA
ctgtccaagcccggttga

SEQ ID NO: 15222 - DNA, 18 bp, synthetic construct
  misc_feature 1..18: note = Description of Artificial Sequence: Synthetic Antisense oligonucleotide
  modified_base 1: mod_base = OTHER; note = 5-methyl
  modified_base 5..6: mod_base = OTHER; note = 5-methyl
  modified_base 10..12: mod_base = OTHER; note = 5-methyl
  modified_base 9: mod_base = OTHER; note = bicyclic nucleic acid (BNA)
  modified_base 11: mod_base = OTHER; note = bicyclic nucleic acid (BNA)
  modified_base 17..18: mod_base = OTHER; note = bicyclic nucleic acid (BNA)
  source 1..18: mol_type = other DNA
ctgtccaagcccggttga

SEQ ID NO: 15223 - DNA, 18 bp, synthetic construct
  misc_feature 1..18: note = Description of Artificial Sequence: Synthetic Antisense oligonucleotide
  modified_base 1: mod_base = OTHER; note = 5-methyl
  modified_base 5..6: mod_base = OTHER; note = 5-methyl
  modified_base 10..12: mod_base = OTHER; note = 5-methyl
  modified_base 11: mod_base = OTHER; note = bicyclic nucleic acid (BNA)
  modified_base 13: mod_base = OTHER; note = bicyclic nucleic acid (BNA)
  modified_base 17..18: mod_base = OTHER; note = bicyclic nucleic acid (BNA)
  source 1..18: mol_type = other DNA
ctgtccaagcccggttga

SEQ ID NO: 15224 - DNA, 18 bp, synthetic construct
  misc_feature 1..18: note = Description of Artificial Sequence: Synthetic Antisense oligonucleotide
  modified_base 1: mod_base = OTHER; note = 5-methyl
  modified_base 5..6: mod_base = OTHER; note = 5-methyl
  modified_base 10..12: mod_base = OTHER; note = 5-methyl
  modified_base 5: mod_base = OTHER; note = bicyclic nucleic acid (BNA)
  modified_base 14: mod_base = OTHER; note = bicyclic nucleic acid (BNA)
  modified_base 17..18: mod_base = OTHER; note = bicyclic nucleic acid (BNA)
  source 1..18: mol_type = other DNA
ctgtccaagcccggttga

SEQ ID NO: 15225 - DNA, 18 bp, synthetic construct
  misc_feature 1..18: note = Description of Artificial Sequence: Synthetic Antisense oligonucleotide
  modified_base 1: mod_base = OTHER; note = 5-methyl
  modified_base 5..6: mod_base = OTHER; note = 5-methyl
  modified_base 10..12: mod_base = OTHER; note = 5-methyl
  modified_base 3: mod_base = OTHER; note = bicyclic nucleic acid (BNA)
  modified_base 14: mod_base = OTHER; note = bicyclic nucleic acid (BNA)
  modified_base 17..18: mod_base = OTHER; note = bicyclic nucleic acid (BNA)
  source 1..18: mol_type = other DNA
ctgtccaagcccggttga

SEQ ID NO: 15226 - DNA, 18 bp, synthetic construct
  misc_feature 1..18: note = Description of Artificial Sequence: Synthetic Antisense oligonucleotide
  modified_base 1: mod_base = OTHER; note = 5-methyl
  modified_base 5..6: mod_base = OTHER; note = 5-methyl
  modified_base 10..12: mod_base = OTHER; note = 5-methyl
  modified_base 10: mod_base = OTHER; note = bicyclic nucleic acid (BNA)
  modified_base 12: mod_base = OTHER; note = bicyclic nucleic acid (BNA)
  modified_base 17..18: mod_base = OTHER; note = bicyclic nucleic acid (BNA)
  source 1..18: mol_type = other DNA
ctgtccaagcccggttga

SEQ ID NO: 15227 - DNA, 18 bp, synthetic construct
  misc_feature 1..18: note = Description of Artificial Sequence: Synthetic Antisense oligonucleotide
  modified_base 1: mod_base = OTHER; note = 5-methyl
  modified_base 5..6: mod_base = OTHER; note = 5-methyl
  modified_base 10..12: mod_base = OTHER; note = 5-methyl
  modified_base 12: mod_base = OTHER; note = bicyclic nucleic acid (BNA)
  modified_base 14: mod_base = OTHER; note = bicyclic nucleic acid (BNA)
  modified_base 17..18: mod_base = OTHER; note = bicyclic nucleic acid (BNA)
  source 1..18: mol_type = other DNA
ctgtccaagcccggttga

SEQ ID NO: 15228 - DNA, 18 bp, synthetic construct
  misc_feature 1..18: note = Description of Artificial Sequence: Synthetic Antisense oligonucleotide
  modified_base 1: mod_base = OTHER; note = 5-methyl
  modified_base 5..6: mod_base = OTHER; note = 5-methyl
  modified_base 10..12: mod_base = OTHER; note = 5-methyl
  modified_base 5: mod_base = OTHER; note = bicyclic nucleic acid (BNA)
  modified_base 11: mod_base = OTHER; note = bicyclic nucleic acid (BNA)
  modified_base 17..18: mod_base = OTHER; note = bicyclic nucleic acid (BNA)
  source 1..18: mol_type = other DNA
ctgtccaagcccggttga

SEQ ID NO: 15229 - DNA, 18 bp, synthetic construct
  misc_feature 1..18: note = Description of Artificial Sequence: Synthetic Antisense oligonucleotide
  modified_base 1: mod_base = OTHER; note = 5-methyl
  modified_base 5..6: mod_base = OTHER; note = 5-methyl
  modified_base 10..12: mod_base = OTHER; note = 5-methyl
  modified_base 6: mod_base = OTHER; note = bicyclic nucleic acid (BNA)
  modified_base 12: mod_base = OTHER; note = bicyclic nucleic acid (BNA)
  modified_base 17..18: mod_base = OTHER; note = bicyclic nucleic acid (BNA)
  source 1..18: mol_type = other DNA
ctgtccaagcccggttga

SEQ ID NO: 15230 - DNA, 18 bp, synthetic construct
  misc_feature 1..18: note = Description of Artificial Sequence: Synthetic Antisense oligonucleotide
  modified_base 1: mod_base = OTHER; note = 5-methyl
  modified_base 5..6: mod_base = OTHER; note = 5-methyl
  modified_base 10..12: mod_base = OTHER; note = 5-methyl
  modified_base 5..6: mod_base = OTHER; note = bicyclic nucleic acid (BNA)
  modified_base 17..18: mod_base = OTHER; note = bicyclic nucleic acid (BNA)
  source 1..18: mol_type = other DNA
ctgtccaagcccggttga

SEQ ID NO: 15231 - DNA, 18 bp, synthetic construct
  misc_feature 1..18: note = Description of Artificial Sequence: Synthetic Antisense oligonucleotide
  modified_base 1: mod_base = OTHER; note = 5-methyl
  modified_base 5..6: mod_base = OTHER; note = 5-methyl
  modified_base 10..12: mod_base = OTHER; note = 5-methyl
  modified_base 11: mod_base = OTHER; note = bicyclic nucleic acid (BNA)
  modified_base 14: mod_base = OTHER; note = bicyclic nucleic acid (BNA)
  modified_base 17..18: mod_base = OTHER; note = bicyclic nucleic acid (BNA)
  source 1..18: mol_type = other DNA
ctgtccaagcccggttga

SEQ ID NO: 15232 - DNA, 18 bp, synthetic construct
  misc_feature 1..18: note = Description of Artificial Sequence: Synthetic Antisense oligonucleotide
  modified_base 1: mod_base = OTHER; note = 5-methyl
  modified_base 5..6: mod_base = OTHER; note = 5-methyl
  modified_base 10..12: mod_base = OTHER; note = 5-methyl
  modified_base 9: mod_base = OTHER; note = bicyclic nucleic acid (BNA)
  modified_base 12: mod_base = OTHER; note = bicyclic nucleic acid (BNA)
  modified_base 17..18: mod_base = OTHER; note = bicyclic nucleic acid (BNA)
  source 1..18: mol_type = other DNA
ctgtccaagcccggttga

SEQ ID NO: 15233 - DNA, 18 bp, synthetic construct
  misc_feature 1..18: note = Description of Artificial Sequence: Synthetic Antisense oligonucleotide
  modified_base 1: mod_base = OTHER; note = 5-methyl
  modified_base 5..6: mod_base = OTHER; note = 5-methyl
  modified_base 10..12: mod_base = OTHER; note = 5-methyl
  modified_base 3: mod_base = OTHER; note = bicyclic nucleic acid (BNA)
  modified_base 11: mod_base = OTHER; note = bicyclic nucleic acid (BNA)
  modified_base 17..18: mod_base = OTHER; note = bicyclic nucleic acid (BNA)
  source 1..18: mol_type = other DNA
ctgtccaagcccggttga

SEQ ID NO: 15234 - DNA, 18 bp, synthetic construct
  misc_feature 1..18: note = Description of Artificial Sequence: Synthetic Antisense oligonucleotide
  modified_base 1: mod_base = OTHER; note = 5-methyl
  modified_base 5..6: mod_base = OTHER; note = 5-methyl
  modified_base 10..12: mod_base = OTHER; note = 5-methyl
  modified_base 10..11: mod_base = OTHER; note = bicyclic nucleic acid (BNA)
  modified_base 17..18: mod_base = OTHER; note = bicyclic nucleic acid (BNA)
  source 1..18: mol_type = other DNA
ctgtccaagcccggttga

SEQ ID NO: 15235 - DNA, 18 bp, synthetic construct
  misc_feature 1..18: note = Description of Artificial Sequence: Synthetic Antisense oligonucleotide
  modified_base 1: mod_base = OTHER; note = 5-methyl
  modified_base 5..6: mod_base = OTHER; note = 5-methyl
  modified_base 10..12: mod_base = OTHER; note = 5-methyl
  modified_base 12..13: mod_base = OTHER; note = bicyclic nucleic acid (BNA)
  modified_base 17..18: mod_base = OTHER; note = bicyclic nucleic acid (BNA)
  source 1..18: mol_type = other DNA
ctgtccaagcccggttga

SEQ ID NO: 15236 - DNA, 18 bp, synthetic construct
  misc_feature 1..18: note = Description of Artificial Sequence: Synthetic Antisense oligonucleotide
  modified_base 1: mod_base = OTHER; note = 5-methyl
  modified_base 5..6: mod_base = OTHER; note = 5-methyl
  modified_base 10..12: mod_base = OTHER; note = 5-methyl
  modified_base 5: mod_base = OTHER; note = bicyclic nucleic acid (BNA)
  modified_base 12: mod_base = OTHER; note = bicyclic nucleic acid (BNA)
  modified_base 17..18: mod_base = OTHER; note = bicyclic nucleic acid (BNA)
  source 1..18: mol_type = other DNA
ctgtccaagcccggttga

SEQ ID NO: 15237 - DNA, 18 bp, synthetic construct
  misc_feature 1..18: note = Description of Artificial Sequence: Synthetic Antisense oligonucleotide
  modified_base 1: mod_base = OTHER; note = 5-methyl
  modified_base 5..6: mod_base = OTHER; note = 5-methyl
  modified_base 10..12: mod_base = OTHER; note = 5-methyl
  modified_base 10: mod_base = OTHER; note = bicyclic nucleic acid (BNA)
  modified_base 14: mod_base = OTHER; note = bicyclic nucleic acid (BNA)
  modified_base 17..18: mod_base = OTHER; note = bicyclic nucleic acid (BNA)
  source 1..18: mol_type = other DNA
ctgtccaagcccggttga

SEQ ID NO: 15238 - DNA, 18 bp, synthetic construct
  misc_feature 1..18: note = Description of Artificial Sequence: Synthetic Antisense oligonucleotide
  modified_base 1: mod_base = OTHER; note = 5-methyl
  modified_base 5..6: mod_base = OTHER; note = 5-methyl
  modified_base 10..12: mod_base = OTHER; note = 5-methyl
  modified_base 6: mod_base = OTHER; note = bicyclic nucleic acid (BNA)
  modified_base 11: mod_base = OTHER; note = bicyclic nucleic acid (BNA)
  modified_base 17..18: mod_base = OTHER; note = bicyclic nucleic acid (BNA)
  source 1..18: mol_type = other DNA
ctgtccaagcccggttga

SEQ ID NO: 15239 - DNA, 18 bp, synthetic construct
  misc_feature 1..18: note = Description of Artificial Sequence: Synthetic Antisense oligonucleotide
  modified_base 1: mod_base = OTHER; note = 5-methyl
  modified_base 5..6: mod_base = OTHER; note = 5-methyl
  modified_base 10..12: mod_base = OTHER; note = 5-methyl
  modified_base 9: mod_base = OTHER; note = bicyclic nucleic acid (BNA)
  modified_base 13: mod_base = OTHER; note = bicyclic nucleic acid (BNA)
  modified_base 17..18: mod_base = OTHER; note = bicyclic nucleic acid (BNA)
  source 1..18: mol_type = other DNA
ctgtccaagcccggttga

SEQ ID NO: 15240 - DNA, 18 bp, synthetic construct
  misc_feature 1..18: note = Description of Artificial Sequence: Synthetic Antisense oligonucleotide
  modified_base 1: mod_base = OTHER; note = 5-methyl
  modified_base 5..6: mod_base = OTHER; note = 5-methyl
  modified_base 10..12: mod_base = OTHER; note = 5-methyl
  modified_base 3: mod_base = OTHER; note = bicyclic nucleic acid (BNA)
  modified_base 12: mod_base = OTHER; note = bicyclic nucleic acid (BNA)
  modified_base 17..18: mod_base = OTHER; note = bicyclic nucleic acid (BNA)
  source 1..18: mol_type = other DNA
ctgtccaagcccggttga

SEQ ID NO: 15241 - DNA, 18 bp, synthetic construct
  misc_feature 1..18: note = Description of Artificial Sequence: Synthetic Antisense oligonucleotide
  modified_base 1: mod_base = OTHER; note = 5-methyl
  modified_base 5..6: mod_base = OTHER; note = 5-methyl
  modified_base 10..12: mod_base = OTHER; note = 5-methyl
  modified_base 3: mod_base = OTHER; note = bicyclic nucleic acid (BNA)
  modified_base 5: mod_base = OTHER; note = bicyclic nucleic acid (BNA)
  modified_base 17..18: mod_base = OTHER; note = bicyclic nucleic acid (BNA)
  source 1..18: mol_type = other DNA
ctgtccaagcccggttga

SEQ ID NO: 15242 - DNA, 18 bp, synthetic construct
  misc_feature 1..18: note = Description of Artificial Sequence: Synthetic Antisense oligonucleotide
  modified_base 1: mod_base = OTHER; note = 5-methyl
  modified_base 5..6: mod_base = OTHER; note = 5-methyl
  modified_base 10..12: mod_base = OTHER; note = 5-methyl
  modified_base 10: mod_base = OTHER; note = bicyclic nucleic acid (BNA)
  modified_base 13: mod_base = OTHER; note = bicyclic nucleic acid (BNA)
  modified_base 17..18: mod_base = OTHER; note = bicyclic nucleic acid (BNA)
  source 1..18: mol_type = other DNA
ctgtccaagcccggttga

SEQ ID NO: 15243 - DNA, 20 bp, synthetic construct
  misc_feature 1..20: note = Description of Artificial Sequence: Synthetic Antisense oligonucleotide
  modified_base 2: mod_base = OTHER; note = 5-methyl
  modified_base 14: mod_base = OTHER; note = 5-methyl
  modified_base 19: mod_base = OTHER; note = 5-methyl
  modified_base 2: mod_base = OTHER; note = bicyclic nucleic acid (BNA)
  modified_base 19..20: mod_base = OTHER; note = bicyclic nucleic acid (BNA)
  source 1..20: mol_type = other DNA
tcaaggaagatggcatttct

SEQ ID NO: 15244 - DNA, 20 bp, synthetic construct
  misc_feature 1..20: note = Description of Artificial Sequence: Synthetic Antisense oligonucleotide
  modified_base 2: mod_base = OTHER; note = 5-methyl
  modified_base 14: mod_base = OTHER; note = 5-methyl
  modified_base 19: mod_base = OTHER; note = 5-methyl
  modified_base 9: mod_base = OTHER; note = bicyclic nucleic acid (BNA)
  modified_base 19..20: mod_base = OTHER; note = bicyclic nucleic acid (BNA)
  source 1..20: mol_type = other DNA
tcaaggaagatggcatttct

SEQ ID NO: 15245 - DNA, 20 bp, synthetic construct
  misc_feature 1..20: note = Description of Artificial Sequence: Synthetic Antisense oligonucleotide
  modified_base 2: mod_base = OTHER; note = 5-methyl
  modified_base 14: mod_base = OTHER; note = 5-methyl
  modified_base 19: mod_base = OTHER; note = 5-methyl
  modified_base 5: mod_base = OTHER; note = bicyclic nucleic acid (BNA)
  modified_base 19..20: mod_base = OTHER; note = bicyclic nucleic acid (BNA)
  source 1..20: mol_type = other DNA
tcaaggaagatggcatttct

SEQ ID NO: 15246 - DNA, 20 bp, synthetic construct
  misc_feature 1..20: note = Description of Artificial Sequence: Synthetic Antisense oligonucleotide
  modified_base 2: mod_base = OTHER; note = 5-methyl
  modified_base 14: mod_base = OTHER; note = 5-methyl
  modified_base 19: mod_base = OTHER; note = 5-methyl
  modified_base 6: mod_base = OTHER; note = bicyclic nucleic acid (BNA)
  modified_base 19..20: mod_base = OTHER; note = bicyclic nucleic acid (BNA)
  source 1..20: mol_type = other DNA
tcaaggaagatggcatttct

SEQ ID NO: 15247 - DNA, 20 bp, synthetic construct
  misc_feature 1..20: note = Description of Artificial Sequence: Synthetic Antisense oligonucleotide
  modified_base 2: mod_base = OTHER; note = 5-methyl
  modified_base 14: mod_base = OTHER; note = 5-methyl
  modified_base 19: mod_base = OTHER; note = 5-methyl
  modified_base 12: mod_base = OTHER; note = bicyclic nucleic acid (BNA)
  modified_base 19..20: mod_base = OTHER; note = bicyclic nucleic acid (BNA)
  source 1..20: mol_type = other DNA
tcaaggaagatggcatttct

SEQ ID NO: 15248 - DNA, 20 bp, synthetic construct
  misc_feature 1..20: note = Description of Artificial Sequence: Synthetic Antisense oligonucleotide
  modified_base 2: mod_base = OTHER; note = 5-methyl
  modified_base 14: mod_base = OTHER; note = 5-methyl
  modified_base 19: mod_base = OTHER; note = 5-methyl
  modified_base 13: mod_base = OTHER; note = bicyclic nucleic acid (BNA)
  modified_base 19..20: mod_base = OTHER; note = bicyclic nucleic acid (BNA)
  source 1..20: mol_type = other DNA
tcaaggaagatggcatttct

SEQ ID NO: 15249 - DNA, 20 bp, synthetic construct
  misc_feature 1..20: note = Description of Artificial Sequence: Synthetic Antisense oligonucleotide
  modified_base 2: mod_base = OTHER; note = 5-methyl
  modified_base 14: mod_base = OTHER; note = 5-methyl
  modified_base 19: mod_base = OTHER; note = 5-methyl
  modified_base 14: mod_base = OTHER; note = bicyclic nucleic acid (BNA)
  modified_base 19..20: mod_base = OTHER; note = bicyclic nucleic acid (BNA)
  source 1..20: mol_type = other DNA
tcaaggaagatggcatttct

SEQ ID NO: 15250 - DNA, 22 bp, synthetic construct
  misc_feature 1..22: note = Description of Artificial Sequence: Synthetic Antisense oligonucleotide
  modified_base 2: mod_base = OTHER; note = 5-methyl
  modified_base 14: mod_base = OTHER; note = 5-methyl
  modified_base 19: mod_base = OTHER; note = 5-methyl
  modified_base 2: mod_base = OTHER; note = bicyclic nucleic acid (BNA)
  modified_base 21..22: mod_base = OTHER; note = bicyclic nucleic acid (BNA)
  source 1..22: mol_type = other DNA
tcaaggaagatggcatttctag

SEQ ID NO: 15251 - DNA, 22 bp, synthetic construct
  misc_feature 1..22: note = Description of Artificial Sequence: Synthetic Antisense oligonucleotide
  modified_base 2: mod_base = OTHER; note = 5-methyl
  modified_base 14: mod_base = OTHER; note = 5-methyl
  modified_base 19: mod_base = OTHER; note = 5-methyl
  modified_base 9: mod_base = OTHER; note = bicyclic nucleic acid (BNA)
  modified_base 21..22: mod_base = OTHER; note = bicyclic nucleic acid (BNA)
  source 1..22: mol_type = other DNA
tcaaggaagatggcatttctag

SEQ ID NO: 15252 - DNA, 22 bp, synthetic construct
  misc_feature 1..22: note = Description of Artificial Sequence: Synthetic Antisense oligonucleotide
  modified_base 2: mod_base = OTHER; note = 5-methyl
  modified_base 14: mod_base = OTHER; note = 5-methyl
  modified_base 19: mod_base = OTHER; note = 5-methyl
  modified_base 5: mod_base = OTHER; note = bicyclic nucleic acid (BNA)
  modified_base 21..22: mod_base = OTHER; note = bicyclic nucleic acid (BNA)
  source 1..22: mol_type = other DNA
tcaaggaagatggcatttctag

SEQ ID NO: 15253 - DNA, 22 bp, synthetic construct
  misc_feature 1..22: note = Description of Artificial Sequence: Synthetic Antisense oligonucleotide
  modified_base 2: mod_base = OTHER; note = 5-methyl
  modified_base 14: mod_base = OTHER; note = 5-methyl
  modified_base 19: mod_base = OTHER; note = 5-methyl
  modified_base 6: mod_base = OTHER; note = bicyclic nucleic acid (BNA)
  modified_base 21..22: mod_base = OTHER; note = bicyclic nucleic acid (BNA)
  source 1..22: mol_type = other DNA
tcaaggaagatggcatttctag

SEQ ID NO: 15254 - DNA, 22 bp, synthetic construct
  misc_feature 1..22: note = Description of Artificial Sequence: Synthetic Antisense oligonucleotide
  modified_base 2: mod_base = OTHER; note = 5-methyl
  modified_base 14: mod_base = OTHER; note = 5-methyl
  modified_base 19: mod_base = OTHER; note = 5-methyl
  modified_base 12: mod_base = OTHER; note = bicyclic nucleic acid (BNA)
  modified_base 21..22: mod_base = OTHER; note = bicyclic nucleic acid (BNA)
  source 1..22: mol_type = other DNA
tcaaggaagatggcatttctag

SEQ ID NO: 15255 - DNA, 22 bp, synthetic construct
  misc_feature 1..22: note = Description of Artificial Sequence: Synthetic Antisense oligonucleotide
  modified_base 2: mod_base = OTHER; note = 5-methyl
  modified_base 14: mod_base = OTHER; note = 5-methyl
  modified_base 19: mod_base = OTHER; note = 5-methyl
  modified_base 13: mod_base = OTHER; note = bicyclic nucleic acid (BNA)
  modified_base 21..22: mod_base = OTHER; note = bicyclic nucleic acid (BNA)
  source 1..22: mol_type = other DNA
tcaaggaagatggcatttctag

SEQ ID NO: 15256 - DNA, 22 bp, synthetic construct
  misc_feature 1..22: note = Description of Artificial Sequence: Synthetic Antisense oligonucleotide
  modified_base 2: mod_base = OTHER; note = 5-methyl
  modified_base 14: mod_base = OTHER; note = 5-methyl
  modified_base 19: mod_base = OTHER; note = 5-methyl
  modified_base 19: mod_base = OTHER; note = bicyclic nucleic acid (BNA)
  modified_base 21..22: mod_base = OTHER; note = bicyclic nucleic acid (BNA)
  source 1..22: mol_type = other DNA
tcaaggaagatggcatttctag

SEQ ID NO: 15257 - DNA, 22 bp, synthetic construct
  misc_feature 1..22: note = Description of Artificial Sequence: Synthetic Antisense oligonucleotide
  modified_base 2: mod_base = OTHER; note = 5-methyl
  modified_base 14: mod_base = OTHER; note = 5-methyl
  modified_base 19: mod_base = OTHER; note = 5-methyl
  modified_base 14: mod_base = OTHER; note = bicyclic nucleic acid (BNA)
  modified_base 21..22: mod_base = OTHER; note = bicyclic nucleic acid (BNA)
  source 1..22: mol_type = other DNA
tcaaggaagatggcatttctag

SEQ ID NO: 15258 - DNA, 20 bp, synthetic construct
  misc_feature 1..20: note = Description of Artificial Sequence: Synthetic Antisense oligonucleotide
  modified_base 2: mod_base = OTHER; note = 5-methyl
  modified_base 14: mod_base = OTHER; note = 5-methyl
  modified_base 19: mod_base = OTHER; note = 5-methyl
  modified_base 9: mod_base = OTHER; note = bicyclic nucleic acid (BNA)
  modified_base 14: mod_base = OTHER; note = bicyclic nucleic acid (BNA)
  modified_base 19..20: mod_base = OTHER; note = bicyclic nucleic acid (BNA)
  source 1..20: mol_type = other DNA
tcaaggaagatggcatttct

SEQ ID NO: 15259 - DNA, 20 bp, synthetic construct
  misc_feature 1..20: note = Description of Artificial Sequence: Synthetic Antisense oligonucleotide
  modified_base 2: mod_base = OTHER; note = 5-methyl
  modified_base 14: mod_base = OTHER; note = 5-methyl
  modified_base 19: mod_base = OTHER; note = 5-methyl
  modified_base 5: mod_base = OTHER; note = bicyclic nucleic acid (BNA)
  modified_base 9: mod_base = OTHER; note = bicyclic nucleic acid (BNA)
  modified_base 19..20: mod_base = OTHER; note = bicyclic nucleic acid (BNA)
  source 1..20: mol_type = other DNA
tcaaggaagatggcatttct

SEQ ID NO: 15260 - DNA, 20 bp, synthetic construct
  misc_feature 1..20: note = Description of Artificial Sequence: Synthetic Antisense oligonucleotide
  modified_base 2: mod_base = OTHER; note = 5-methyl
  modified_base 14: mod_base = OTHER; note = 5-methyl
  modified_base 19: mod_base = OTHER; note = 5-methyl
  modified_base 6: mod_base = OTHER; note = bicyclic nucleic acid (BNA)
  modified_base 14: mod_base = OTHER; note = bicyclic nucleic acid (BNA)
  modified_base 19..20: mod_base = OTHER; note = bicyclic nucleic acid (BNA)
  source 1..20: mol_type = other DNA
tcaaggaagatggcatttct

SEQ ID NO: 15261 - DNA, 20 bp, synthetic construct
  misc_feature 1..20: note = Description of Artificial Sequence: Synthetic Antisense oligonucleotide
  modified_base 2: mod_base = OTHER; note = 5-methyl
  modified_base 14: mod_base = OTHER; note = 5-methyl
  modified_base 19: mod_base = OTHER; note = 5-methyl
  modified_base 5: mod_base = OTHER; note = bicyclic nucleic acid (BNA)
  modified_base 13: mod_base = OTHER; note = bicyclic nucleic acid (BNA)
  modified_base 19..20: mod_base = OTHER; note = bicyclic nucleic acid (BNA)
  source 1..20: mol_type = other DNA
tcaaggaagatggcatttct

SEQ ID NO: 15262 - DNA, 20 bp, synthetic construct
  misc_feature 1..20: note = Description of Artificial Sequence: Synthetic Antisense oligonucleotide
  modified_base 2: mod_base = OTHER; note = 5-methyl
  modified_base 14: mod_base = OTHER; note = 5-methyl
  modified_base 19: mod_base = OTHER; note = 5-methyl
  modified_base 2: mod_base = OTHER; note = bicyclic nucleic acid (BNA)
  modified_base 12: mod_base = OTHER; note = bicyclic nucleic acid (BNA)
  modified_base 19..20: mod_base = OTHER; note = bicyclic nucleic acid (BNA)
  source 1..20: mol_type = other DNA
tcaaggaagatggcatttct

SEQ ID NO: 15263 - DNA, 20 bp, synthetic construct
  misc_feature 1..20: note = Description of Artificial Sequence: Synthetic Antisense oligonucleotide
  modified_base 2: mod_base = OTHER; note = 5-methyl
  modified_base 14: mod_base = OTHER; note = 5-methyl
  modified_base 19: mod_base = OTHER; note = 5-methyl
  modified_base 6: mod_base = OTHER; note = bicyclic nucleic acid (BNA)
  modified_base 9: mod_base = OTHER; note = bicyclic nucleic acid (BNA)
  modified_base 19..20: mod_base = OTHER; note = bicyclic nucleic acid (BNA)
  source 1..20: mol_type = other DNA
tcaaggaagatggcatttct

SEQ ID NO: 15264 - DNA, 20 bp, synthetic construct
  misc_feature 1..20: note = Description of Artificial Sequence: Synthetic Antisense oligonucleotide
  modified_base 2: mod_base = OTHER; note = 5-methyl
  modified_base 14: mod_base = OTHER; note = 5-methyl
  modified_base 19: mod_base = OTHER; note = 5-methyl
  modified_base 13..14: mod_base = OTHER; note = bicyclic nucleic acid (BNA)
  modified_base 19..20: mod_base = OTHER; note = bicyclic nucleic acid (BNA)
  source 1..20: mol_type = other DNA
tcaaggaagatggcatttct

SEQ ID NO: 15265 - DNA, 20 bp, synthetic construct
  misc_feature 1..20: note = Description of Artificial Sequence: Synthetic Antisense oligonucleotide
  modified_base 2: mod_base = OTHER; note = 5-methyl
  modified_base 14: mod_base = OTHER; note = 5-methyl
  modified_base 19: mod_base = OTHER; note = 5-methyl
  modified_base 6: mod_base = OTHER; note = bicyclic nucleic acid (BNA)
  modified_base 13: mod_base = OTHER; note = bicyclic nucleic acid (BNA)
  modified_base 19..20: mod_base = OTHER; note = bicyclic nucleic acid (BNA)
  source 1..20: mol_type = other DNA
tcaaggaagatggcatttct

SEQ ID NO: 15266 - DNA, 20 bp, synthetic construct
  misc_feature 1..20: note = Description of Artificial Sequence: Synthetic Antisense oligonucleotide
  modified_base 2: mod_base = OTHER; note = 5-methyl
  modified_base 14: mod_base = OTHER; note = 5-methyl
  modified_base 19: mod_base = OTHER; note = 5-methyl
  modified_base 5: mod_base = OTHER; note = bicyclic nucleic acid (BNA)
  modified_base 14: mod_base = OTHER; note = bicyclic nucleic acid (BNA)
  modified_base 19..20: mod_base = OTHER; note = bicyclic nucleic acid (BNA)
  source 1..20: mol_type = other DNA
tcaaggaagatggcatttct

SEQ ID NO: 15267 - DNA, 20 bp, synthetic construct
  misc_feature 1..20: note = Description of Artificial Sequence: Synthetic Antisense oligonucleotide
  modified_base 2: mod_base = OTHER; note = 5-methyl
  modified_base 14: mod_base = OTHER; note = 5-methyl
  modified_base 19: mod_base = OTHER; note = 5-methyl
  modified_base 2: mod_base = OTHER; note = bicyclic nucleic acid (BNA)
  modified_base 6: mod_base = OTHER; note = bicyclic nucleic acid (BNA)
  modified_base 19..20: mod_base = OTHER; note = bicyclic nucleic acid (BNA)
  source 1..20: mol_type = other DNA
tcaaggaagatggcatttct

SEQ ID NO: 15268 - DNA, 20 bp, synthetic construct
  misc_feature 1..20: note = Description of Artificial Sequence: Synthetic Antisense oligonucleotide
  modified_base 2: mod_base = OTHER; note = 5-methyl
  modified_base 14: mod_base = OTHER; note = 5-methyl
  modified_base 19: mod_base = OTHER; note = 5-methyl
  modified_base 12: mod_base = OTHER; note = bicyclic nucleic acid (BNA)
  modified_base 14: mod_base = OTHER; note = bicyclic nucleic acid (BNA)
  modified_base 19..20: mod_base = OTHER; note = bicyclic nucleic acid (BNA)
  source 1..20: mol_type = other DNA
tcaaggaagatggcatttct

SEQ ID NO: 15269 - DNA, 20 bp, synthetic construct
  misc_feature 1..20: note = Description of Artificial Sequence: Synthetic Antisense oligonucleotide
  modified_base 2: mod_base = OTHER; note = 5-methyl
  modified_base 14: mod_base = OTHER; note = 5-methyl
  modified_base 19: mod_base = OTHER; note = 5-methyl
  modified_base 6: mod_base = OTHER; note = bicyclic nucleic acid (BNA)
  modified_base 12: mod_base = OTHER; note = bicyclic nucleic acid (BNA)
  modified_base 19..20: mod_base = OTHER; note = bicyclic nucleic acid (BNA)
  source 1..20: mol_type = other DNA
tcaaggaagatggcatttct

SEQ ID NO: 15270 - DNA, 20 bp, synthetic construct
  misc_feature 1..20: note = Description of Artificial Sequence: Synthetic Antisense oligonucleotide
  modified_base 2: mod_base = OTHER; note = 5-methyl
  modified_base 14: mod_base = OTHER; note = 5-methyl
  modified_base 19: mod_base = OTHER; note = 5-methyl
  modified_base 5..6: mod_base = OTHER; note = bicyclic nucleic acid (BNA)
  modified_base 19..20: mod_base = OTHER; note = bicyclic nucleic acid (BNA)
  source 1..20: mol_type = other DNA
tcaaggaagatggcatttct

SEQ ID NO: 15271 - DNA, 20 bp, synthetic construct
  misc_feature 1..20: note = Description of Artificial Sequence: Synthetic Antisense oligonucleotide
  modified_base 2: mod_base = OTHER; note = 5-methyl
  modified_base 14: mod_base = OTHER; note = 5-methyl
  modified_base 19: mod_base = OTHER; note = 5-methyl
  modified_base 2: mod_base = OTHER; note = bicyclic nucleic acid (BNA)
  modified_base 14: mod_base = OTHER; note = bicyclic nucleic acid (BNA)
  modified_base 19..20: mod_base = OTHER; note = bicyclic nucleic acid (BNA)
  source 1..20: mol_type = other DNA
tcaaggaagatggcatttct

SEQ ID NO: 15272 - DNA, 20 bp, synthetic construct
  misc_feature 1..20: note = Description of Artificial Sequence: Synthetic Antisense oligonucleotide
  modified_base 2: mod_base = OTHER; note = 5-methyl
  modified_base 14: mod_base = OTHER; note = 5-methyl
  modified_base 19: mod_base = OTHER; note = 5-methyl
  modified_base 9: mod_base = OTHER; note = bicyclic nucleic acid (BNA)
  modified_base 12: mod_base = OTHER; note = bicyclic nucleic acid (BNA)
  modified_base 19..20: mod_base = OTHER; note = bicyclic nucleic acid (BNA)
  source 1..20: mol_type = other DNA
tcaaggaagatggcatttct

SEQ ID NO: 15273 - DNA, 20 bp, synthetic construct
  misc_feature 1..20: note = Description of Artificial Sequence: Synthetic Antisense oligonucleotide
  modified_base 2: mod_base = OTHER; note = 5-methyl
  modified_base 14: mod_base = OTHER; note = 5-methyl
  modified_base 19: mod_base = OTHER; note = 5-methyl
  modified_base 2: mod_base = OTHER; note = bicyclic nucleic acid (BNA)
  modified_base 5: mod_base = OTHER; note = bicyclic nucleic acid (BNA)
  modified_base 19..20: mod_base = OTHER; note = bicyclic nucleic acid (BNA)
  source 1..20: mol_type = other DNA
tcaaggaagatggcatttct

SEQ ID NO: 15274 - DNA, 20 bp, synthetic construct
  misc_feature 1..20: note = Description of Artificial Sequence: Synthetic Antisense oligonucleotide
  modified_base 2: mod_base = OTHER; note = 5-methyl
  modified_base 14: mod_base = OTHER; note = 5-methyl
  modified_base 19: mod_base = OTHER; note = 5-methyl
  modified_base 12..13: mod_base = OTHER; note = bicyclic nucleic acid (BNA)
  modified_base 19..20: mod_base = OTHER; note = bicyclic nucleic acid (BNA)
  source 1..20: mol_type = other DNA
tcaaggaagatggcatttct

SEQ ID NO: 15275 - DNA, 20 bp, synthetic construct
  misc_feature 1..20: note = Description of Artificial Sequence: Synthetic Antisense oligonucleotide
  modified_base 2: mod_base = OTHER; note = 5-methyl
  modified_base 14: mod_base = OTHER; note = 5-methyl
  modified_base 19: mod_base = OTHER; note = 5-methyl
  modified_base 5: mod_base = OTHER; note = bicyclic nucleic acid (BNA)
  modified_base 12: mod_base = OTHER; note = bicyclic nucleic acid (BNA)
  modified_base 19..20: mod_base = OTHER; note = bicyclic nucleic acid (BNA)
  source 1..20: mol_type = other DNA
tcaaggaagatggcatttct

SEQ ID NO: 15276 - DNA, 20 bp, synthetic construct
  misc_feature 1..20: note = Description of Artificial Sequence: Synthetic Antisense oligonucleotide
  modified_base 2: mod_base = OTHER; note = 5-methyl
  modified_base 14: mod_base = OTHER; note = 5-methyl
  modified_base 19: mod_base = OTHER; note = 5-methyl
  modified_base 2: mod_base = OTHER; note = bicyclic nucleic acid (BNA)
  modified_base 13: mod_base = OTHER; note = bicyclic nucleic acid (BNA)
  modified_base 19..20: mod_base = OTHER; note = bicyclic nucleic acid (BNA)
  source 1..20: mol_type = other DNA
tcaaggaagatggcatttct

SEQ ID NO: 15277 - DNA, 20 bp, synthetic construct
  misc_feature 1..20: note = Description of Artificial Sequence: Synthetic Antisense oligonucleotide
  modified_base 2: mod_base = OTHER; note = 5-methyl
  modified_base 14: mod_base = OTHER; note = 5-methyl
  modified_base 19: mod_base = OTHER; note = 5-methyl
  modified_base 9: mod_base = OTHER; note = bicyclic nucleic acid (BNA)
  modified_base 13: mod_base = OTHER; note = bicyclic nucleic acid (BNA)
  modified_base 19..20: mod_base = OTHER; note = bicyclic nucleic acid (BNA)
  source 1..20: mol_type = other DNA
tcaaggaagatggcatttct

SEQ ID NO: 15278 - DNA, 20 bp, synthetic construct
  misc_feature 1..20: note = Description of Artificial Sequence: Synthetic Antisense oligonucleotide
  modified_base 2: mod_base = OTHER; note = 5-methyl
  modified_base 14: mod_base = OTHER; note = 5-methyl
  modified_base 19: mod_base = OTHER; note = 5-methyl
  modified_base 2: mod_base = OTHER; note = bicyclic nucleic acid (BNA)
  modified_base 9: mod_base = OTHER; note = bicyclic nucleic acid (BNA)
  modified_base 19..20: mod_base = OTHER; note = bicyclic nucleic acid (BNA)
  source 1..20: mol_type = other DNA
tcaaggaagatggcatttct

SEQ ID NO: 15279 - DNA, 22 bp, synthetic construct
  misc_feature 1..22: note = Description of Artificial Sequence: Synthetic Antisense oligonucleotide
  modified_base 2: mod_base = OTHER; note = 5-methyl
  modified_base 14: mod_base = OTHER; note = 5-methyl
  modified_base 19: mod_base = OTHER; note = 5-methyl
  modified_base 9: mod_base = OTHER; note = bicyclic nucleic acid (BNA)
  modified_base 14: mod_base = OTHER; note = bicyclic nucleic acid (BNA)
  modified_base 21..22: mod_base = OTHER; note = bicyclic nucleic acid (BNA)
  source 1..22: mol_type = other DNA
tcaaggaagatggcatttctag

SEQ ID NO: 15280 - DNA, 22 bp, synthetic construct
  misc_feature 1..22: note = Description of Artificial Sequence: Synthetic Antisense oligonucleotide
  modified_base 2: mod_base = OTHER; note = 5-methyl
  modified_base 14: mod_base = OTHER; note = 5-methyl
  modified_base 19: mod_base = OTHER; note = 5-methyl
  modified_base 5: mod_base = OTHER; note = bicyclic nucleic acid (BNA)
  modified_base 9: mod_base = OTHER; note = bicyclic nucleic acid (BNA)
  modified_base 21..22: mod_base = OTHER; note = bicyclic nucleic acid (BNA)
  source 1..22: mol_type = other DNA
tcaaggaagatggcatttctag

SEQ ID NO: 15281 - DNA, 22 bp, synthetic construct
  misc_feature 1..22: note = Description of Artificial Sequence: Synthetic Antisense oligonucleotide
  modified_base 2: mod_base = OTHER; note = 5-methyl
  modified_base 14: mod_base = OTHER; note = 5-methyl
  modified_base 19: mod_base = OTHER; note = 5-methyl
  modified_base 5: mod_base = OTHER; note = bicyclic nucleic acid (BNA)
  modified_base 19: mod_base = OTHER; note = bicyclic nucleic acid (BNA)
  modified_base 21..22: mod_base = OTHER; note = bicyclic nucleic acid (BNA)
  source 1..22: mol_type = other DNA
tcaaggaagatggcatttctag

SEQ ID NO: 15282 - DNA, 22 bp, synthetic construct
  misc_feature 1..22: note = Description of Artificial Sequence: Synthetic Antisense oligonucleotide
  modified_base 2: mod_base = OTHER; note = 5-methyl
  modified_base 14: mod_base = OTHER; note = 5-methyl
  modified_base 19: mod_base = OTHER; note = 5-methyl
  modified_base 6: mod_base = OTHER; note = bicyclic nucleic acid (BNA)
  modified_base 14: mod_base = OTHER; note = bicyclic nucleic acid (BNA)
  modified_base 21..22: mod_base = OTHER; note = bicyclic nucleic acid (BNA)
  source 1..22: mol_type = other DNA
tcaaggaagatggcatttctag

SEQ ID NO: 15283 - DNA, 22 bp, synthetic construct
  misc_feature 1..22: note = Description of Artificial Sequence: Synthetic Antisense oligonucleotide
  modified_base 2: mod_base = OTHER; note = 5-methyl
  modified_base 14: mod_base = OTHER; note = 5-methyl
  modified_base 19: mod_base = OTHER; note = 5-methyl
  modified_base 5: mod_base = OTHER; note = bicyclic nucleic acid (BNA)
  modified_base 13: mod_base = OTHER; note = bicyclic nucleic acid (BNA)
  modified_base 21..22: mod_base = OTHER; note = bicyclic nucleic acid (BNA)
  source 1..22: mol_type = other DNA
tcaaggaagatggcatttctag

SEQ ID NO: 15284 - DNA, 22 bp, synthetic construct
  misc_feature 1..22: note = Description of Artificial Sequence: Synthetic Antisense oligonucleotide
  modified_base 2: mod_base = OTHER; note = 5-methyl
  modified_base 14: mod_base = OTHER; note = 5-methyl
  modified_base 19: mod_base = OTHER; note = 5-methyl
  modified_base 2: mod_base = OTHER; note = bicyclic nucleic acid (BNA)
  modified_base 12: mod_base = OTHER; note = bicyclic nucleic acid (BNA)
  modified_base 21..22: mod_base = OTHER; note = bicyclic nucleic acid (BNA)
  source 1..22: mol_type = other DNA
tcaaggaagatggcatttctag

SEQ ID NO: 15285 - DNA, 22 bp, synthetic construct
  misc_feature 1..22: note = Description of Artificial Sequence: Synthetic Antisense oligonucleotide
  modified_base 2: mod_base = OTHER; note = 5-methyl
  modified_base 14: mod_base = OTHER; note = 5-methyl
  modified_base 19: mod_base = OTHER; note = 5-methyl
  modified_base 6: mod_base = OTHER; note = bicyclic nucleic acid (BNA)
  modified_base 9: mod_base = OTHER; note = bicyclic nucleic acid (BNA)
  modified_base 21..22: mod_base = OTHER; note = bicyclic nucleic acid (BNA)
  source 1..22: mol_type = other DNA
tcaaggaagatggcatttctag

SEQ ID NO: 15286 - DNA, 22 bp, synthetic construct
  misc_feature 1..22: note = Description of Artificial Sequence: Synthetic Antisense oligonucleotide
  modified_base 2: mod_base = OTHER; note = 5-methyl
  modified_base 14: mod_base = OTHER; note = 5-methyl
  modified_base 19: mod_base = OTHER; note = 5-methyl
  modified_base 13..14: mod_base = OTHER; note = bicyclic nucleic acid (BNA)
  modified_base 21..22: mod_base = OTHER; note = bicyclic nucleic acid (BNA)
  source 1..22: mol_type = other DNA
tcaaggaagatggcatttctag

SEQ ID NO: 15287 - DNA, 22 bp, synthetic construct
  misc_feature 1..22: note = Description of Artificial Sequence: Synthetic Antisense oligonucleotide
  modified_base 2: mod_base = OTHER; note = 5-methyl
  modified_base 14: mod_base = OTHER; note = 5-methyl
  modified_base 19: mod_base = OTHER; note = 5-methyl
  modified_base 6: mod_base = OTHER; note = bicyclic nucleic acid (BNA)
  modified_base 13: mod_base = OTHER; note = bicyclic nucleic acid (BNA)
  modified_base 21..22: mod_base = OTHER; note = bicyclic nucleic acid (BNA)
  source 1..22: mol_type = other DNA
tcaaggaagatggcatttctag

SEQ ID NO: 15288 - DNA, 22 bp, synthetic construct
  misc_feature 1..22: note = Description of Artificial Sequence: Synthetic Antisense oligonucleotide
  modified_base 2: mod_base = OTHER; note = 5-methyl
  modified_base 14: mod_base = OTHER; note = 5-methyl
  modified_base 19: mod_base = OTHER; note = 5-methyl
  modified_base 6: mod_base = OTHER; note = bicyclic nucleic acid (BNA)
  modified_base 19: mod_base = OTHER; note = bicyclic nucleic acid (BNA)
  modified_base 21..22: mod_base = OTHER; note = bicyclic nucleic acid (BNA)
  source 1..22: mol_type = other DNA
tcaaggaagatggcatttctag

SEQ ID NO: 15289 - DNA, 22 bp, synthetic construct
  misc_feature 1..22: note = Description of Artificial Sequence: Synthetic Antisense oligonucleotide
  modified_base 2: mod_base = OTHER; note = 5-methyl
  modified_base 14: mod_base = OTHER; note = 5-methyl
  modified_base 19: mod_base = OTHER; note = 5-methyl
  modified_base 5: mod_base = OTHER; note = bicyclic nucleic acid (BNA)
  modified_base 14: mod_base = OTHER; note = bicyclic nucleic acid (BNA)
  modified_base 21..22: mod_base = OTHER; note = bicyclic nucleic acid (BNA)
  source 1..22: mol_type = other DNA
tcaaggaagatggcatttctag

SEQ ID NO: 15290 - DNA, 22 bp, synthetic construct
  misc_feature 1..22: note = Description of Artificial Sequence: Synthetic Antisense oligonucleotide
  modified_base 2: mod_base = OTHER; note = 5-methyl
  modified_base 14: mod_base = OTHER; note = 5-methyl
  modified_base 19: mod_base = OTHER; note = 5-methyl
  modified_base 2: mod_base = OTHER; note = bicyclic nucleic acid (BNA)
  modified_base 6: mod_base = OTHER; note = bicyclic nucleic acid (BNA)
  modified_base 21..22: mod_base = OTHER; note = bicyclic nucleic acid (BNA)
  source 1..22: mol_type = other DNA
tcaaggaagatggcatttctag

SEQ ID NO: 15291 - DNA, 22 bp, synthetic construct
  misc_feature 1..22: note = Description of Artificial Sequence: Synthetic Antisense oligonucleotide
  modified_base 2: mod_base = OTHER; note = 5-methyl
  modified_base 14: mod_base = OTHER; note = 5-methyl
  modified_base 19: mod_base = OTHER; note = 5-methyl
  modified_base 12: mod_base = OTHER; note = bicyclic nucleic acid (BNA)
  modified_base 19: mod_base = OTHER; note = bicyclic nucleic acid (BNA)
  modified_base 21..22: mod_base = OTHER; note = bicyclic nucleic acid (BNA)
  source 1..22: mol_type = other DNA
tcaaggaagatggcatttctag

SEQ ID NO: 15292 - DNA, 22 bp, synthetic construct
  misc_feature 1..22: note = Description of Artificial Sequence: Synthetic Antisense oligonucleotide
  modified_base 2: mod_base = OTHER; note = 5-methyl
  modified_base 14: mod_base = OTHER; note = 5-methyl
  modified_base 19: mod_base = OTHER; note = 5-methyl
  modified_base 12: mod_base = OTHER; note = bicyclic nucleic acid (BNA)
  modified_base 14: mod_base = OTHER; note = bicyclic nucleic acid (BNA)
  modified_base 21..22: mod_base = OTHER; note = bicyclic nucleic acid (BNA)
  source 1..22: mol_type = other DNA
tcaaggaagatggcatttctag

SEQ ID NO: 15293 - DNA, 22 bp, synthetic construct
  misc_feature 1..22: note = Description of Artificial Sequence: Synthetic Antisense oligonucleotide
  modified_base 2: mod_base = OTHER; note = 5-methyl
  modified_base 14: mod_base = OTHER; note = 5-methyl
  modified_base 19: mod_base = OTHER; note = 5-methyl
  modified_base 6: mod_base = OTHER; note = bicyclic nucleic acid (BNA)
  modified_base 12: mod_base = OTHER; note = bicyclic nucleic acid (BNA)
  modified_base 21..22: mod_base = OTHER; note = bicyclic nucleic acid (BNA)
  source 1..22: mol_type = other DNA
tcaaggaagatggcatttctag

SEQ ID NO: 15294 - DNA, 22 bp, synthetic construct
  misc_feature 1..22: note = Description of Artificial Sequence: Synthetic Antisense oligonucleotide
  modified_base 2: mod_base = OTHER; note = 5-methyl
  modified_base 14: mod_base = OTHER; note = 5-methyl
  modified_base 19: mod_base = OTHER; note = 5-methyl
  modified_base 5..6: mod_base = OTHER; note = bicyclic nucleic acid (BNA)
  modified_base 21..22: mod_base = OTHER; note = bicyclic nucleic acid (BNA)
  source 1..22: mol_type = other DNA
tcaaggaagatggcatttctag

SEQ ID NO: 15295 - DNA, 22 bp, synthetic construct
  misc_feature 1..22: note = Description of Artificial Sequence: Synthetic Antisense oligonucleotide
  modified_base 2: mod_base = OTHER; note = 5-methyl
  modified_base 14: mod_base = OTHER; note = 5-methyl
  modified_base 19: mod_base = OTHER; note = 5-methyl
  modified_base 2: mod_base = OTHER; note = bicyclic nucleic acid (BNA)
  modified_base 14: mod_base = OTHER; note = bicyclic nucleic acid (BNA)
  modified_base 21..22: mod_base = OTHER; note = bicyclic nucleic acid (BNA)
  source 1..22: mol_type = other DNA
tcaaggaagatggcatttctag

SEQ ID NO: 15296 - DNA, 22 bp, synthetic construct
  misc_feature 1..22: note = Description of Artificial Sequence: Synthetic Antisense oligonucleotide
  modified_base 2: mod_base = OTHER; note = 5-methyl
  modified_base 14: mod_base = OTHER; note = 5-methyl
  modified_base 19: mod_base = OTHER; note = 5-methyl
  modified_base 9: mod_base = OTHER; note = bicyclic nucleic acid (BNA)
  modified_base 12: mod_base = OTHER; note = bicyclic nucleic acid (BNA)
  modified_base 21..22: mod_base = OTHER; note = bicyclic nucleic acid (BNA)
  source 1..22: mol_type = other DNA
tcaaggaagatggcatttctag

SEQ ID NO: 15297 - DNA, 22 bp, synthetic construct
  misc_feature 1..22: note = Description of Artificial Sequence: Synthetic Antisense oligonucleotide
  modified_base 2: mod_base = OTHER; note = 5-methyl
  modified_base 14: mod_base = OTHER; note = 5-methyl
  modified_base 19: mod_base = OTHER; note = 5-methyl
  modified_base 2: mod_base = OTHER; note = bicyclic nucleic acid (BNA)
  modified_base 5: mod_base = OTHER; note = bicyclic nucleic acid (BNA)
  modified_base 21..22: mod_base = OTHER; note = bicyclic nucleic acid (BNA)
  source 1..22: mol_type = other DNA
tcaaggaagatggcatttctag

SEQ ID NO: 15298 - DNA, 22 bp, synthetic construct
  misc_feature 1..22: note = Description of Artificial Sequence: Synthetic Antisense oligonucleotide
  modified_base 2: mod_base = OTHER; note = 5-methyl
  modified_base 14: mod_base = OTHER; note = 5-methyl
  modified_base 19: mod_base = OTHER; note = 5-methyl
  modified_base 13: mod_base = OTHER; note = bicyclic nucleic acid (BNA)
  modified_base 19: mod_base = OTHER; note = bicyclic nucleic acid (BNA)
  modified_base 21..22: mod_base = OTHER; note = bicyclic nucleic acid (BNA)
  source 1..22: mol_type = other DNA
tcaaggaagatggcatttctag

SEQ ID NO: 15299 - DNA, 22 bp, synthetic construct
  misc_feature 1..22: note = Description of Artificial Sequence: Synthetic Antisense oligonucleotide
  modified_base 2: mod_base = OTHER; note = 5-methyl
  modified_base 14: mod_base = OTHER; note = 5-methyl
  modified_base 19: mod_base = OTHER; note = 5-methyl
  modified_base 12..13: mod_base = OTHER; note = bicyclic nucleic acid (BNA)
  modified_base 21..22: mod_base = OTHER; note = bicyclic nucleic acid (BNA)
  source 1..22: mol_type = other DNA
tcaaggaagatggcatttctag

SEQ ID NO: 15300 - DNA, 22 bp, synthetic construct
  misc_feature 1..22: note = Description of Artificial Sequence: Synthetic Antisense oligonucleotide
  modified_base 2: mod_base = OTHER; note = 5-methyl
  modified_base 14: mod_base = OTHER; note = 5-methyl
  modified_base 19: mod_base = OTHER; note = 5-methyl
  modified_base 5: mod_base = OTHER; note = bicyclic nucleic acid (BNA)
  modified_base 12: mod_base = OTHER; note = bicyclic nucleic acid (BNA)
  modified_base 21..22: mod_base = OTHER; note = bicyclic nucleic acid (BNA)
  source 1..22: mol_type = other DNA
tcaaggaagatggcatttctag

SEQ ID NO: 15301 - DNA, 22 bp, synthetic construct
  misc_feature 1..22: note = Description of Artificial Sequence: Synthetic Antisense oligonucleotide
  modified_base 2: mod_base = OTHER; note = 5-methyl
  modified_base 14: mod_base = OTHER; note = 5-methyl
  modified_base 19: mod_base = OTHER; note = 5-methyl
  modified_base 2: mod_base = OTHER; note = bicyclic nucleic acid (BNA)
  modified_base 13: mod_base = OTHER; note = bicyclic nucleic acid (BNA)
  modified_base 21..22: mod_base = OTHER; note = bicyclic nucleic acid (BNA)
  source 1..22: mol_type = other DNA
tcaaggaagatggcatttctag

SEQ ID NO: 15302 - DNA, 22 bp, synthetic construct
  misc_feature 1..22: note = Description of Artificial Sequence: Synthetic Antisense oligonucleotide
  modified_base 2: mod_base = OTHER; note = 5-methyl
  modified_base 14: mod_base = OTHER; note = 5-methyl
  modified_base 19: mod_base = OTHER; note = 5-methyl
  modified_base 9: mod_base = OTHER; note = bicyclic nucleic acid (BNA)
  modified_base 13: mod_base = OTHER; note = bicyclic nucleic acid (BNA)
  modified_base 21..22: mod_base = OTHER; note = bicyclic nucleic acid (BNA)
  source 1..22: mol_type = other DNA
tcaaggaagatggcatttctag

SEQ ID NO: 15303 - DNA, 22 bp, synthetic construct
  misc_feature 1..22: note = Description of Artificial Sequence: Synthetic Antisense oligonucleotide
  modified_base 2: mod_base = OTHER; note = 5-methyl
  modified_base 14: mod_base = OTHER; note = 5-methyl
  modified_base 19: mod_base = OTHER; note = 5-methyl
  modified_base 2: mod_base = OTHER; note = bicyclic nucleic acid (BNA)
  modified_base 19: mod_base = OTHER; note = bicyclic nucleic acid (BNA)
  modified_base 21..22: mod_base = OTHER; note = bicyclic nucleic acid (BNA)
  source 1..22: mol_type = other DNA
tcaaggaagatggcatttctag

SEQ ID NO: 15304 - DNA, 22 bp, synthetic construct
  misc_feature 1..22: note = Description of Artificial Sequence: Synthetic Antisense oligonucleotide
  modified_base 2: mod_base = OTHER; note = 5-methyl
  modified_base 14: mod_base = OTHER; note = 5-methyl
  modified_base 19: mod_base = OTHER; note = 5-methyl
  modified_base 2: mod_base = OTHER; note = bicyclic nucleic acid (BNA)
  modified_base 9: mod_base = OTHER; note = bicyclic nucleic acid (BNA)
  modified_base 21..22: mod_base = OTHER; note = bicyclic nucleic acid (BNA)
  source 1..22: mol_type = other DNA
tcaaggaagatggcatttctag

SEQ ID NO: 15305 - DNA, 22 bp, synthetic construct
  misc_feature 1..22: note = Description of Artificial Sequence: Synthetic Antisense oligonucleotide
  modified_base 2: mod_base = OTHER; note = 5-methyl
  modified_base 14: mod_base = OTHER; note = 5-methyl
  modified_base 19: mod_base = OTHER; note = 5-methyl
  modified_base 14: mod_base = OTHER; note = bicyclic nucleic acid (BNA)
  modified_base 19: mod_base = OTHER; note = bicyclic nucleic acid (BNA)
  modified_base 21..22: mod_base = OTHER; note = bicyclic nucleic acid (BNA)
  source 1..22: mol_type = other DNA
tcaaggaagatggcatttctag

SEQ ID NO: 15306 - DNA, 22 bp, synthetic construct
  misc_feature 1..22: note = Description of Artificial Sequence: Synthetic Antisense oligonucleotide
  modified_base 2: mod_base = OTHER; note = 5-methyl
  modified_base 14: mod_base = OTHER; note = 5-methyl
  modified_base 19: mod_base = OTHER; note = 5-methyl
  modified_base 9: mod_base = OTHER; note = bicyclic nucleic acid (BNA)
  modified_base 19: mod_base = OTHER; note = bicyclic nucleic acid (BNA)
  modified_base 21..22: mod_base = OTHER; note = bicyclic nucleic acid (BNA)
  source 1..22: mol_type = other DNA
tcaaggaagatggcatttctag

SEQ ID NO: 15307 - RNA, 18 nt, synthetic construct
  misc_feature 1..18: note = Description of Artificial Sequence: Synthetic Antisense oligonucleotide
  modified_base 1..2: mod_base = OTHER; note = bicyclic nucleic acid (BNA)
  modified_base 9: mod_base = OTHER; note = bicyclic nucleic acid (BNA)
  modified_base 17..18: mod_base = OTHER; note = bicyclic nucleic acid (BNA)
  source 1..18: mol_type = other RNA
ggtaagttctgtccaagc

SEQ ID NO: 15308 - RNA, 18 nt, synthetic construct
  misc_feature 1..18: note = Description of Artificial Sequence: Synthetic Antisense oligonucleotide
  modified_base 1..2: mod_base = OTHER; note = bicyclic nucleic acid (BNA)
  modified_base 11: mod_base = OTHER; note = bicyclic nucleic acid (BNA)
  modified_base 17..18: mod_base = OTHER; note = bicyclic nucleic acid (BNA)
  source 1..18: mol_type = other RNA
ggtaagttctgtccaagc

SEQ ID NO: 15309 - RNA, 18 nt, synthetic construct
  misc_feature 1..18: note = Description of Artificial Sequence: Synthetic Antisense oligonucleotide
  modified_base 1..2: mod_base = OTHER; note = bicyclic nucleic acid (BNA)
  modified_base 6: mod_base = OTHER; note = bicyclic nucleic acid (BNA)
  modified_base 17..18: mod_base = OTHER; note = bicyclic nucleic acid (BNA)
  source 1..18: mol_type = other RNA
ggtaagttctgtccaagc

SEQ ID NO: 15310 - RNA, 18 nt, synthetic construct
  misc_feature 1..18: note = Description of Artificial Sequence: Synthetic Antisense oligonucleotide
  modified_base 1..2: mod_base = OTHER; note = bicyclic nucleic acid (BNA)
  modified_base 13: mod_base = OTHER; note = bicyclic nucleic acid (BNA)
  modified_base 17..18: mod_base = OTHER; note = bicyclic nucleic acid (BNA)
  source 1..18: mol_type = other RNA
ggtaagttctgtccaagc

SEQ ID NO: 15311 - RNA, 18 nt, synthetic construct
  misc_feature 1..18: note = Description of Artificial Sequence: Synthetic Antisense oligonucleotide
  modified_base 1..2: mod_base = OTHER; note = bicyclic nucleic acid (BNA)
  modified_base 14: mod_base = OTHER; note = bicyclic nucleic acid (BNA)
  modified_base 17..18: mod_base = OTHER; note = bicyclic nucleic acid (BNA)
  source 1..18: mol_type = other RNA
ggtaagttctgtccaagc

SEQ ID NO: 15312 - DNA, 18 bp, synthetic construct
  misc_feature 1..18: note = Description of Artificial Sequence: Synthetic Antisense oligonucleotide
  misc_feature 1..18: note = Original Sequence: gtaaguucuguccaagcc
  modified_base 1..2: mod_base = OTHER; note = bicyclic nucleic acid (BNA)
  modified_base 16..18: mod_base = OTHER; note = bicyclic nucleic acid (BNA)
  source 1..18: mol_type = other DNA
  modified_base 6: mod_base = OTHER; note = Uracil
  modified_base 7: mod_base = OTHER; note = Uracil
  modified_base 9: mod_base = OTHER; note = Uracil
  modified_base 11: mod_base = OTHER; note = Uracil
gtaagttctgtccaagcc

SEQ ID NO: 15313 - DNA, 18 bp, synthetic construct
  misc_feature 1..18: note = Description of Artificial Sequence: Synthetic Antisense oligonucleotide
  misc_feature 1..18: note = Original Sequence: gtaaguucuguccaagcc
  modified_base 1..2: mod_base = OTHER; note = bicyclic nucleic acid (BNA)
  modified_base 10: mod_base = OTHER; note = bicyclic nucleic acid (BNA)
  modified_base 17..18: mod_base = OTHER; note = bicyclic nucleic acid (BNA)
  source 1..18: mol_type = other DNA
  modified_base 6: mod_base = OTHER; note = Uracil
  modified_base 7: mod_base = OTHER; note = Uracil
  modified_base 9: mod_base = OTHER; note = Uracil
  modified_base 11: mod_base = OTHER; note = Uracil
gtaagttctgtccaagcc

SEQ ID NO: 15314 - DNA, 18 bp, synthetic construct
  misc_feature 1..18: note = Description of Artificial Sequence: Synthetic Antisense oligonucleotide
  misc_feature 1..18: note = Original Sequence: gtaaguucuguccaagcc
  modified_base 1..2: mod_base = OTHER; note = bicyclic nucleic acid (BNA)
  modified_base 5: mod_base = OTHER; note = bicyclic nucleic acid (BNA)
  modified_base 17..18: mod_base = OTHER; note = bicyclic nucleic acid (BNA)
  source 1..18: mol_type = other DNA
  modified_base 6: mod_base = OTHER; note = Uracil
  modified_base 7: mod_base = OTHER; note = Uracil
  modified_base 9: mod_base = OTHER; note = Uracil
  modified_base 11: mod_base = OTHER; note = Uracil
gtaagttctgtccaagcc

SEQ ID NO: 15315 - DNA, 18 bp, synthetic construct
  misc_feature 1..18: note = Description of Artificial Sequence: Synthetic Antisense oligonucleotide
  misc_feature 1..18: note = Original Sequence: gtaaguucuguccaagcc
  modified_base 1..2: mod_base = OTHER; note = bicyclic nucleic acid (BNA)
  modified_base 12: mod_base = OTHER; note = bicyclic nucleic acid (BNA)
  modified_base 17..18: mod_base = OTHER; note = bicyclic nucleic acid (BNA)
  source 1..18: mol_type = other DNA
  modified_base 6: mod_base = OTHER; note = Uracil
  modified_base 7: mod_base = OTHER; note = Uracil
  modified_base 9: mod_base = OTHER; note = Uracil
  modified_base 11: mod_base = OTHER; note = Uracil
gtaagttctgtccaagcc

SEQ ID NO: 15316 - DNA, 18 bp, synthetic construct
  misc_feature 1..18: note = Description of Artificial Sequence: Synthetic Antisense oligonucleotide
  misc_feature 1..18: note = Original Sequence: gtaaguucuguccaagcc
  modified_base 1..2: mod_base = OTHER; note = bicyclic nucleic acid (BNA)
  modified_base 13: mod_base = OTHER; note = bicyclic nucleic acid (BNA)
  modified_base 17..18: mod_base = OTHER; note = bicyclic nucleic acid (BNA)
  source 1..18: mol_type = other DNA
  modified_base 6: mod_base = OTHER; note = Uracil
  modified_base 7: mod_base = OTHER; note = Uracil
  modified_base 9: mod_base = OTHER; note = Uracil
  modified_base 11: mod_base = OTHER; note = Uracil
gtaagttctgtccaagcc

SEQ ID NO: 15317 - DNA, 18 bp, synthetic construct
  misc_feature 1..18: note = Description of Artificial Sequence: Synthetic Antisense oligonucleotide
  misc_feature 1..18: note = Original Sequence: gtaaguucuguccaagcc
  modified_base 1..2: mod_base = OTHER; note = bicyclic nucleic acid (BNA)
  modified_base 8: mod_base = OTHER; note = bicyclic nucleic acid (BNA)
  modified_base 17..18: mod_base = OTHER; note = bicyclic nucleic acid (BNA)
  source 1..18: mol_type = other DNA
  modified_base 6: mod_base = OTHER; note = Uracil
  modified_base 7: mod_base = OTHER; note = Uracil
  modified_base 9: mod_base = OTHER; note = Uracil
  modified_base 11: mod_base = OTHER; note = Uracil
gtaagttctgtccaagcc

SEQ ID NO: 15318 - RNA, 18 nt, synthetic construct
  misc_feature 1..18: note = Description of Artificial Sequence: Synthetic Antisense oligonucleotide
  modified_base 1..2: mod_base = OTHER; note = bicyclic nucleic acid (BNA)
  modified_base 4: mod_base = OTHER; note = bicyclic nucleic acid (BNA)
  modified_base 17..18: mod_base = OTHER; note = bicyclic nucleic acid (BNA)
  source 1..18: mol_type = other RNA
agtcggtaagttctgtcc

SEQ ID NO: 15319 - RNA, 18 nt, synthetic construct
  misc_feature 1..18: note = Description of Artificial Sequence: Synthetic Antisense oligonucleotide
  modified_base 1..2: mod_base = OTHER; note = bicyclic nucleic acid (BNA)
  modified_base 10: mod_base = OTHER; note = bicyclic nucleic acid (BNA)
  modified_base 17..18: mod_base = OTHER; note = bicyclic nucleic acid (BNA)
  source 1..18: mol_type = other RNA
agtcggtaagttctgtcc

SEQ ID NO: 15320 - RNA, 18 nt, synthetic construct
  misc_feature 1..18: note = Description of Artificial Sequence: Synthetic Antisense oligonucleotide
  modified_base 1..2: mod_base = OTHER; note = bicyclic nucleic acid (BNA)
  modified_base 5: mod_base = OTHER; note = bicyclic nucleic acid (BNA)
  modified_base 17..18: mod_base = OTHER; note = bicyclic nucleic acid (BNA)
  source 1..18: mol_type = other RNA
agtcggtaagttctgtcc

SEQ ID NO: 15321 - RNA, 18 nt, synthetic construct
  misc_feature 1..18: note = Description of Artificial Sequence: Synthetic Antisense oligonucleotide
  modified_base 1..2: mod_base = OTHER; note = bicyclic nucleic acid (BNA)
  modified_base 6: mod_base = OTHER; note = bicyclic nucleic acid (BNA)
  modified_base 17..18: mod_base = OTHER; note = bicyclic nucleic acid (BNA)
  source 1..18: mol_type = other RNA
agtcggtaagttctgtcc

SEQ ID NO: 15322 - RNA, 18 nt, synthetic construct
  misc_feature 1..18: note = Description of Artificial Sequence: Synthetic Antisense oligonucleotide
  modified_base 1..2: mod_base = OTHER; note = bicyclic nucleic acid (BNA)
  modified_base 13: mod_base = OTHER; note = bicyclic nucleic acid (BNA)
  modified_base 17..18: mod_base = OTHER; note = bicyclic nucleic acid (BNA)
  source 1..18: mol_type = other RNA
agtcggtaagttctgtcc

SEQ ID NO: 15323 - RNA, 18 nt, synthetic construct
  misc_feature 1..18: note = Description of Artificial Sequence: Synthetic Antisense oligonucleotide
  modified_base 1..2: mod_base = OTHER; note = bicyclic nucleic acid (BNA)
  modified_base 15: mod_base = OTHER; note = bicyclic nucleic acid (BNA)
  modified_base 17..18: mod_base = OTHER; note = bicyclic nucleic acid (BNA)
  source 1..18: mol_type = other RNA
agtcggtaagttctgtcc

SEQ ID NO: 15324 - DNA, 18 bp, synthetic construct
  misc_feature 1..18: note = Description of Artificial Sequence: Synthetic Antisense oligonucleotide
  misc_feature 1..18: note = Original Sequence: ctguccaagcccgguuga
  modified_base 1..3: mod_base = OTHER; note = bicyclic nucleic acid (BNA)
  modified_base 17..18: mod_base = OTHER; note = bicyclic nucleic acid (BNA)
  source 1..18: mol_type = other DNA
  modified_base 4: mod_base = OTHER; note = Uracil
  modified_base 15: mod_base = OTHER; note = Uracil
  modified_base 16: mod_base = OTHER; note = Uracil
ctgtccaagcccggttga

SEQ ID NO: 15325 - DNA, 18 bp, synthetic construct
  misc_feature 1..18: note = Description of Artificial Sequence: Synthetic Antisense oligonucleotide
  misc_feature 1..18: note = Original Sequence: ctguccaagcccgguuga
  modified_base 1..2: mod_base = OTHER; note = bicyclic nucleic acid (BNA)
  modified_base 9: mod_base = OTHER; note = bicyclic nucleic acid (BNA)
  modified_base 17..18: mod_base = OTHER; note = bicyclic nucleic acid (BNA)
  source 1..18: mol_type = other DNA
  modified_base 4: mod_base = OTHER; note = Uracil
  modified_base 15: mod_base = OTHER; note = Uracil
  modified_base 16: mod_base = OTHER; note = Uracil
ctgtccaagcccggttga

SEQ ID NO: 15326 - DNA, 18 bp, synthetic construct
  misc_feature 1..18: note = Description of Artificial Sequence: Synthetic Antisense oligonucleotide
  misc_feature 1..18: note = Original Sequence: ctguccaagcccgguuga
  modified_base 1..2: mod_base = OTHER; note = bicyclic nucleic acid (BNA)
  modified_base 10: mod_base = OTHER; note = bicyclic nucleic acid (BNA)
  modified_base 17..18: mod_base = OTHER; note = bicyclic nucleic acid (BNA)
  source 1..18: mol_type = other DNA
  modified_base 4: mod_base = OTHER; note = Uracil
  modified_base 15: mod_base = OTHER; note = Uracil
  modified_base 16: mod_base = OTHER; note = Uracil
ctgtccaagcccggttga

SEQ ID NO: 15327 - DNA, 18 bp, synthetic construct
  misc_feature 1..18: note = Description of Artificial Sequence: Synthetic Antisense oligonucleotide
  misc_feature 1..18: note = Original Sequence: ctguccaagcccgguuga
  modified_base 1..2: mod_base = OTHER; note = bicyclic nucleic acid (BNA)
  modified_base 5: mod_base = OTHER; note = bicyclic nucleic acid (BNA)
  modified_base 17..18: mod_base = OTHER; note = bicyclic nucleic acid (BNA)
  source 1..18: mol_type = other DNA
  modified_base 4: mod_base = OTHER; note = Uracil
  modified_base 15: mod_base = OTHER; note = Uracil
  modified_base 16: mod_base = OTHER; note = Uracil
ctgtccaagcccggttga

SEQ ID NO: 15328 - DNA, 18 bp, synthetic construct
  misc_feature 1..18: note = Description of Artificial Sequence: Synthetic Antisense oligonucleotide
  misc_feature 1..18: note = Original Sequence: ctguccaagcccgguuga
  modified_base 1..2: mod_base = OTHER; note = bicyclic nucleic acid (BNA)
  modified_base 11: mod_base = OTHER; note = bicyclic nucleic acid (BNA)
  modified_base 17..18: mod_base = OTHER; note = bicyclic nucleic acid (BNA)
  source 1..18: mol_type = other DNA
  modified_base 4: mod_base = OTHER; note = Uracil
  modified_base 15: mod_base = OTHER; note = Uracil
  modified_base 16: mod_base = OTHER; note = Uracil
ctgtccaagcccggttga

SEQ ID NO: 15329 - DNA, 18 bp, synthetic construct
  misc_feature 1..18: note = Description of Artificial Sequence: Synthetic Antisense oligonucleotide
  misc_feature 1..18: note = Original Sequence: ctguccaagcccgguuga
  modified_base 1..2: mod_base = OTHER; note = bicyclic nucleic acid (BNA)
  modified_base 6: mod_base = OTHER; note = bicyclic nucleic acid (BNA)
  modified_base 17..18: mod_base = OTHER; note = bicyclic nucleic acid (BNA)
  source 1..18: mol_type = other DNA
  modified_base 4: mod_base = OTHER; note = Uracil
  modified_base 15: mod_base = OTHER; note = Uracil
  modified_base 16: mod_base = OTHER; note = Uracil
ctgtccaagcccggttga

SEQ ID NO: 15330 - DNA, 18 bp, synthetic construct
  misc_feature 1..18: note = Description of Artificial Sequence: Synthetic Antisense oligonucleotide
  misc_feature 1..18: note = Original Sequence: ctguccaagcccgguuga
  modified_base 1..2: mod_base = OTHER; note = bicyclic nucleic acid (BNA)
  modified_base 12: mod_base = OTHER; note = bicyclic nucleic acid (BNA)
  modified_base 17..18: mod_base = OTHER; note = bicyclic nucleic acid (BNA)
  source 1..18: mol_type = other DNA
  modified_base 4: mod_base = OTHER; note = Uracil
  modified_base 15: mod_base = OTHER; note = Uracil
  modified_base 16: mod_base = OTHER; note = Uracil
ctgtccaagcccggttga

SEQ ID NO: 15331 - DNA, 18 bp, synthetic construct
  misc_feature 1..18: note = Description of Artificial Sequence: Synthetic Antisense oligonucleotide
  misc_feature 1..18: note = Original Sequence: ctguccaagcccgguuga
  modified_base 1..2: mod_base = OTHER; note = bicyclic nucleic acid (BNA)
  modified_base 13: mod_base = OTHER; note = bicyclic nucleic acid (BNA)
  modified_base 17..18: mod_base = OTHER; note = bicyclic nucleic acid (BNA)
  source 1..18: mol_type = other DNA
  modified_base 4: mod_base = OTHER; note = Uracil
  modified_base 15: mod_base = OTHER; note = Uracil
  modified_base 16: mod_base = OTHER; note = Uracil
ctgtccaagcccggttga

SEQ ID NO: 15332 - DNA, 18 bp, synthetic construct
  misc_feature 1..18: note = Description of Artificial Sequence: Synthetic Antisense oligonucleotide
  misc_feature 1..18: note = Original Sequence: ctguccaagcccgguuga
  modified_base 1..2: mod_base = OTHER; note = bicyclic nucleic acid (BNA)
  modified_base 14: mod_base = OTHER; note = bicyclic nucleic acid (BNA)
  modified_base 17..18: mod_base = OTHER; note = bicyclic nucleic acid (BNA)
  source 1..18: mol_type = other DNA
  modified_base 4: mod_base = OTHER; note = Uracil
  modified_base 15: mod_base = OTHER; note = Uracil
  modified_base 16: mod_base = OTHER; note = Uracil
ctgtccaagcccggttga

SEQ ID NO: 15333 - RNA, 18 nt, synthetic construct
  misc_feature 1..18: note = Description of Artificial Sequence: Synthetic Antisense oligonucleotide
  modified_base 1..2: mod_base = OTHER; note = bicyclic nucleic acid (BNA)
  modified_base 9: mod_base = OTHER; note = bicyclic nucleic acid (BNA)
  modified_base 14: mod_base = OTHER; note = bicyclic nucleic acid (BNA)
  modified_base 17..18: mod_base = OTHER; note = bicyclic nucleic acid (BNA)
  source 1..18: mol_type = other RNA
ggtaagttctgtccaagc

SEQ ID NO: 15334 - RNA, 18 nt, synthetic construct
  misc_feature 1..18: note = Description of Artificial Sequence: Synthetic Antisense oligonucleotide
  modified_base 1..2: mod_base = OTHER; note = bicyclic nucleic acid (BNA)
  modified_base 6: mod_base = OTHER; note = bicyclic nucleic acid (BNA)
  modified_base 14: mod_base = OTHER; note = bicyclic nucleic acid (BNA)
  modified_base 17..18: mod_base = OTHER; note = bicyclic nucleic acid (BNA)
  source 1..18: mol_type = other RNA
ggtaagttctgtccaagc

SEQ ID NO: 15335 - RNA, 18 nt, synthetic construct
  misc_feature 1..18: note = Description of Artificial Sequence: Synthetic Antisense oligonucleotide
  modified_base 1..2: mod_base = OTHER; note = bicyclic nucleic acid (BNA)
  modified_base 6: mod_base = OTHER; note = bicyclic nucleic acid (BNA)
  modified_base 9: mod_base = OTHER; note = bicyclic nucleic acid (BNA)
  modified_base 17..18: mod_base = OTHER; note = bicyclic nucleic acid (BNA)
  source 1..18: mol_type = other RNA
ggtaagttctgtccaagc

SEQ ID NO: 15336 - RNA, 18 nt, synthetic construct
  misc_feature 1..18: note = Description of Artificial Sequence: Synthetic Antisense oligonucleotide
  modified_base 1..2: mod_base = OTHER; note = bicyclic nucleic acid (BNA)
  modified_base 13..14: mod_base = OTHER; note = bicyclic nucleic acid (BNA)
  modified_base 17..18: mod_base = OTHER; note = bicyclic nucleic acid (BNA)
  source 1..18: mol_type = other RNA
ggtaagttctgtccaagc

SEQ ID NO: 15337 - RNA, 18 nt, synthetic construct
  misc_feature 1..18: note = Description of Artificial Sequence: Synthetic Antisense oligonucleotide
  modified_base 1..2: mod_base = OTHER; note = bicyclic nucleic acid (BNA)
  modified_base 6: mod_base = OTHER; note = bicyclic nucleic acid (BNA)
  modified_base 13: mod_base = OTHER; note = bicyclic nucleic acid (BNA)
  modified_base 17..18: mod_base = OTHER; note = bicyclic nucleic acid (BNA)
  source 1..18: mol_type = other RNA
ggtaagttctgtccaagc

SEQ ID NO: 15338 - RNA, 18 nt, synthetic construct
  misc_feature 1..18: note = Description of Artificial Sequence: Synthetic Antisense oligonucleotide
  modified_base 1..2: mod_base = OTHER; note = bicyclic nucleic acid (BNA)
  modified_base 9: mod_base = OTHER; note = bicyclic nucleic acid (BNA)
  modified_base 11: mod_base = OTHER; note = bicyclic nucleic acid (BNA)
  modified_base 17..18: mod_base = OTHER; note = bicyclic nucleic acid (BNA)
  source 1..18: mol_type = other RNA
ggtaagttctgtccaagc

SEQ ID NO: 15339 - RNA, 18 nt, synthetic construct
  misc_feature 1..18: note = Description of Artificial Sequence: Synthetic Antisense oligonucleotide
  modified_base 1..2: mod_base = OTHER; note = bicyclic nucleic acid (BNA)
  modified_base 11: mod_base = OTHER; note = bicyclic nucleic acid (BNA)
  modified_base 13: mod_base = OTHER; note = bicyclic nucleic acid (BNA)
  modified_base 17..18: mod_base = OTHER; note = bicyclic nucleic acid (BNA)
  source 1..18: mol_type = other RNA
ggtaagttctgtccaagc

SEQ ID NO: 15340 - RNA, 18 nt, synthetic construct
  misc_feature 1..18: note = Description of Artificial Sequence: Synthetic Antisense oligonucleotide
  modified_base 1..2: mod_base = OTHER; note = bicyclic nucleic acid (BNA)
  modified_base 11: mod_base = OTHER; note = bicyclic nucleic acid (BNA)
  modified_base 14: mod_base = OTHER; note = bicyclic nucleic acid (BNA)
  modified_base 17..18: mod_base = OTHER; note = bicyclic nucleic acid (BNA)
  source 1..18: mol_type = other RNA
ggtaagttctgtccaagc

SEQ ID NO: 15341 - RNA, 18 nt, synthetic construct
  misc_feature 1..18: note = Description of Artificial Sequence: Synthetic Antisense oligonucleotide
  modified_base 1..2: mod_base = OTHER; note = bicyclic nucleic acid (BNA)
  modified_base 6: mod_base = OTHER; note = bicyclic nucleic acid (BNA)
  modified_base 11: mod_base = OTHER; note = bicyclic nucleic acid (BNA)
  modified_base 17..18: mod_base = OTHER; note = bicyclic nucleic acid (BNA)
  source 1..18: mol_type = other RNA
ggtaagttctgtccaagc

SEQ ID NO: 15342 - RNA, 18 nt, synthetic construct
  misc_feature 1..18: note = Description of Artificial Sequence: Synthetic Antisense oligonucleotide
  modified_base 1..2: mod_base = OTHER; note = bicyclic nucleic acid (BNA)
  modified_base 9: mod_base = OTHER; note = bicyclic nucleic acid (BNA)
  modified_base 13: mod_base = OTHER; note = bicyclic nucleic acid (BNA)
  modified_base 17..18: mod_base = OTHER; note = bicyclic nucleic acid (BNA)
  source 1..18: mol_type = other RNA
ggtaagttctgtccaagc

SEQ ID NO: 15343 - DNA, 18 bp, synthetic construct
  misc_feature 1..18: note = Description of Artificial Sequence: Synthetic Antisense oligonucleotide
  misc_feature 1..18: note = Original Sequence: gtaaguucuguccaagcc
  modified_base 1..2: mod_base = OTHER; note = bicyclic nucleic acid (BNA)
  modified_base 5: mod_base = OTHER; note = bicyclic nucleic acid (BNA)
  modified_base 8: mod_base = OTHER; note = bicyclic nucleic acid (BNA)
  modified_base 17..18: mod_base = OTHER; note = bicyclic nucleic acid (BNA)
  source 1..18: mol_type = other DNA
  modified_base 6: mod_base = OTHER; note = Uracil
  modified_base 7: mod_base = OTHER; note = Uracil
  modified_base 9: mod_base = OTHER; note = Uracil
  modified_base 11: mod_base = OTHER; note = Uracil
gtaagttctgtccaagcc

SEQ ID NO: 15344 - DNA, 18 bp, synthetic construct
  misc_feature 1..18: note = Description of Artificial Sequence: Synthetic Antisense oligonucleotide
  misc_feature 1..18: note = Original Sequence: gtaaguucuguccaagcc
  modified_base 1..2: mod_base = OTHER; note = bicyclic nucleic acid (BNA)
  modified_base 8: mod_base = OTHER; note = bicyclic nucleic acid (BNA)
  modified_base 13: mod_base = OTHER; note = bicyclic nucleic acid (BNA)
  modified_base 17..18: mod_base = OTHER; note = bicyclic nucleic acid (BNA)
  source 1..18: mol_type = other DNA
  modified_base 6: mod_base = OTHER; note = Uracil
  modified_base 7: mod_base = OTHER; note = Uracil
  modified_base 9: mod_base = OTHER; note = Uracil
  modified_base 11: mod_base = OTHER; note = Uracil
gtaagttctgtccaagcc

SEQ ID NO: 15345 - DNA, 18 bp, synthetic construct
  misc_feature 1..18: note = Description of Artificial Sequence: Synthetic Antisense oligonucleotide
  misc_feature 1..18: note = Original Sequence: gtaaguucuguccaagcc
  modified_base 1..2: mod_base = OTHER; note = bicyclic nucleic acid (BNA)
  modified_base 5: mod_base = OTHER; note = bicyclic nucleic acid (BNA)
  modified_base 13: mod_base = OTHER; note = bicyclic nucleic acid (BNA)
  modified_base 17..18: mod_base = OTHER; note = bicyclic nucleic acid (BNA)
  source 1..18: mol_type = other DNA
  modified_base 6: mod_base = OTHER; note = Uracil
  modified_base 7: mod_base = OTHER; note = Uracil
  modified_base 9: mod_base = OTHER; note = Uracil
  modified_base 11: mod_base = OTHER; note = Uracil
gtaagttctgtccaagcc

SEQ ID NO: 15346 - DNA, 18 bp, synthetic construct
  misc_feature 1..18: note = Description of Artificial Sequence: Synthetic Antisense oligonucleotide
  misc_feature 1..18: note = Original Sequence: gtaaguucuguccaagcc
  modified_base 1..2: mod_base = OTHER; note = bicyclic nucleic acid (BNA)
  modified_base 8: mod_base = OTHER; note = bicyclic nucleic acid (BNA)
  modified_base 12: mod_base = OTHER; note = bicyclic nucleic acid (BNA)
  modified_base 17..18: mod_base = OTHER; note = bicyclic nucleic acid (BNA)
  source 1..18: mol_type = other DNA
  modified_base 6: mod_base = OTHER; note = Uracil
  modified_base 7: mod_base = OTHER; note = Uracil
  modified_base 9: mod_base = OTHER; note = Uracil
  modified_base 11: mod_base = OTHER; note = Uracil
gtaagttctgtccaagcc

SEQ ID NO: 15347 - DNA, 18 bp, synthetic construct
  misc_feature 1..18: note = Description of Artificial Sequence: Synthetic Antisense oligonucleotide
  misc_feature 1..18: note = Original Sequence: gtaaguucuguccaagcc
  modified_base 1..2: mod_base = OTHER; note = bicyclic nucleic acid (BNA)
  modified_base 5: mod_base = OTHER; note = bicyclic nucleic acid (BNA)
  modified_base 10: mod_base = OTHER; note = bicyclic nucleic acid (BNA)
  modified_base 17..18: mod_base = OTHER; note = bicyclic nucleic acid (BNA)
  source 1..18: mol_type = other DNA
  modified_base 6: mod_base = OTHER; note = Uracil
  modified_base 7: mod_base = OTHER; note = Uracil
  modified_base 9: mod_base = OTHER; note = Uracil
  modified_base 11: mod_base = OTHER; note = Uracil
gtaagttctgtccaagcc

SEQ ID NO: 15348 - DNA, 18 bp, synthetic construct
  misc_feature 1..18: note = Description of Artificial Sequence: Synthetic Antisense oligonucleotide
  misc_feature 1..18: note = Original Sequence: gtaaguucuguccaagcc
  modified_base 1..2: mod_base = OTHER; note = bicyclic nucleic acid (BNA)
  modified_base 8: mod_base = OTHER; note = bicyclic nucleic acid (BNA)
  modified_base 16..18: mod_base = OTHER; note = bicyclic nucleic acid (BNA)
  source 1..18: mol_type = other DNA
  modified_base 6: mod_base = OTHER; note = Uracil
  modified_base 7: mod_base = OTHER; note = Uracil
  modified_base 9: mod_base = OTHER; note = Uracil
  modified_base 11: mod_base = OTHER; note = Uracil
gtaagttctgtccaagcc

SEQ ID NO: 15349 - DNA, 18 bp, synthetic construct
  misc_feature 1..18: note = Description of Artificial Sequence: Synthetic Antisense oligonucleotide
  misc_feature 1..18: note = Original Sequence: gtaaguucuguccaagcc
  modified_base 1..2: mod_base = OTHER; note = bicyclic nucleic acid (BNA)
  modified_base 10: mod_base = OTHER; note = bicyclic nucleic acid (BNA)
  modified_base 16..18: mod_base = OTHER; note = bicyclic nucleic acid (BNA)
  source 1..18: mol_type = other DNA
  modified_base 6: mod_base = OTHER; note = Uracil
  modified_base 7: mod_base = OTHER; note = Uracil
  modified_base 9: mod_base = OTHER; note = Uracil
  modified_base 11: mod_base = OTHER; note = Uracil
gtaagttctgtccaagcc

SEQ ID NO: 15350 - DNA, 18 bp, synthetic construct
  misc_feature 1..18: note = Description of Artificial Sequence: Synthetic Antisense oligonucleotide
  misc_feature 1..18: note = Original Sequence: gtaaguucuguccaagcc
  modified_base 1..2: mod_base = OTHER; note = bicyclic nucleic acid (BNA)
  modified_base 10: mod_base = OTHER; note = bicyclic nucleic acid (BNA)
  modified_base 12: mod_base = OTHER; note = bicyclic nucleic acid (BNA)
  modified_base 17..18: mod_base = OTHER; note = bicyclic nucleic acid (BNA)
  source 1..18: mol_type = other DNA
  modified_base 6: mod_base = OTHER; note = Uracil
  modified_base 7: mod_base = OTHER; note = Uracil
  modified_base 9: mod_base = OTHER; note = Uracil
  modified_base 11: mod_base = OTHER; note = Uracil
gtaagttctgtccaagcc

SEQ ID NO: 15351 - DNA, 18 bp, synthetic construct
  misc_feature 1..18: note = Description of Artificial Sequence: Synthetic Antisense oligonucleotide
  misc_feature 1..18: note = Original Sequence: gtaaguucuguccaagcc
  modified_base 1..2: mod_base = OTHER; note = bicyclic nucleic acid (BNA)
  modified_base 12..13: mod_base = OTHER; note = bicyclic nucleic acid (BNA)
  modified_base 17..18: mod_base = OTHER; note = bicyclic nucleic acid (BNA)
  source 1..18: mol_type = other DNA
  modified_base 6: mod_base = OTHER; note = Uracil
  modified_base 7: mod_base = OTHER; note = Uracil
  modified_base 9: mod_base = OTHER; note = Uracil
  modified_base 11: mod_base = OTHER; note = Uracil
gtaagttctgtccaagcc

SEQ ID NO: 15352 - DNA, 18 bp, synthetic construct
  misc_feature 1..18: note = Description of Artificial Sequence: Synthetic Antisense oligonucleotide
  misc_feature 1..18: note = Original Sequence: gtaaguucuguccaagcc
  modified_base 1..2: mod_base = OTHER; note = bicyclic nucleic acid (BNA)
  modified_base 5: mod_base = OTHER; note = bicyclic nucleic acid (BNA)
  modified_base 12: mod_base = OTHER; note = bicyclic nucleic acid (BNA)
  modified_base 17..18: mod_base = OTHER; note = bicyclic nucleic acid (BNA)
  source 1..18: mol_type = other DNA
  modified_base 6: mod_base = OTHER; note = Uracil
  modified_base 7: mod_base = OTHER; note = Uracil
  modified_base 9: mod_base = OTHER; note = Uracil
  modified_base 11: mod_base = OTHER; note = Uracil
gtaagttctgtccaagcc

SEQ ID NO: 15353 - DNA, 18 bp, synthetic construct
  misc_feature 1..18: note = Description of Artificial Sequence: Synthetic Antisense oligonucleotide
  misc_feature 1..18: note = Original Sequence: gtaaguucuguccaagcc
  modified_base 1..2: mod_base = OTHER; note = bicyclic nucleic acid (BNA)
  modified_base 8: mod_base = OTHER; note = bicyclic nucleic acid (BNA)
  modified_base 10: mod_base = OTHER; note = bicyclic nucleic acid (BNA)
  modified_base 17..18: mod_base = OTHER; note = bicyclic nucleic acid (BNA)
  source 1..18: mol_type = other DNA
  modified_base 6: mod_base = OTHER; note = Uracil
  modified_base 7: mod_base = OTHER; note = Uracil
  modified_base 9: mod_base = OTHER; note = Uracil
  modified_base 11: mod_base = OTHER; note = Uracil
gtaagttctgtccaagcc

SEQ ID NO: 15354 - DNA, 18 bp, synthetic construct
  misc_feature 1..18: note = Description of Artificial Sequence: Synthetic Antisense oligonucleotide
  misc_feature 1..18: note = Original Sequence: gtaaguucuguccaagcc
  modified_base 1..2: mod_base = OTHER; note = bicyclic nucleic acid (BNA)
  modified_base 13: mod_base = OTHER; note = bicyclic nucleic acid (BNA)
  modified_base 16..18: mod_base = OTHER; note = bicyclic nucleic acid (BNA)
  source 1..18: mol_type = other DNA
  modified_base 6: mod_base = OTHER; note = Uracil
  modified_base 7: mod_base = OTHER; note = Uracil
  modified_base 9: mod_base = OTHER; note = Uracil
  modified_base 11: mod_base = OTHER; note = Uracil
gtaagttctgtccaagcc

SEQ ID NO: 15355 - DNA, 18 bp, synthetic construct
  misc_feature 1..18: note = Description of Artificial Sequence: Synthetic Antisense oligonucleotide
  misc_feature 1..18: note = Original Sequence: gtaaguucuguccaagcc
  modified_base 1..2: mod_base = OTHER; note = bicyclic nucleic acid (BNA)
  modified_base 5: mod_base = OTHER; note = bicyclic nucleic acid (BNA)
  modified_base 16..18: mod_base = OTHER; note = bicyclic nucleic acid (BNA)
  source 1..18: mol_type = other DNA
  modified_base 6: mod_base = OTHER; note = Uracil
  modified_base 7: mod_base = OTHER; note = Uracil
  modified_base 9: mod_base = OTHER; note = Uracil
  modified_base 11: mod_base = OTHER; note = Uracil
gtaagttctgtccaagcc

SEQ ID NO: 15356 - DNA, 18 bp, synthetic construct
  misc_feature 1..18: note = Description of Artificial Sequence: Synthetic Antisense oligonucleotide
  misc_feature 1..18: note = Original Sequence: gtaaguucuguccaagcc
  modified_base 1..2: mod_base = OTHER; note = bicyclic nucleic acid (BNA)
  modified_base 12: mod_base = OTHER; note = bicyclic nucleic acid (BNA)
  modified_base 16..18: mod_base = OTHER; note = bicyclic nucleic acid (BNA)
  source 1..18: mol_type = other DNA
  modified_base 6: mod_base = OTHER; note = Uracil
  modified_base 7: mod_base = OTHER; note = Uracil
  modified_base 9: mod_base = OTHER; note = Uracil
  modified_base 11: mod_base = OTHER; note = Uracil
gtaagttctgtccaagcc

SEQ ID NO: 15357 - DNA, 18 bp, synthetic construct
  misc_feature 1..18: note = Description of Artificial Sequence: Synthetic Antisense oligonucleotide
  misc_feature 1..18: note = Original Sequence: gtaaguucuguccaagcc
  modified_base 1..2: mod_base = OTHER; note = bicyclic nucleic acid (BNA)
  modified_base 10: mod_base = OTHER; note = bicyclic nucleic acid (BNA)
  modified_base 13: mod_base = OTHER; note = bicyclic nucleic acid (BNA)
  modified_base 17..18: mod_base = OTHER; note = bicyclic nucleic acid (BNA)
  source 1..18: mol_type = other DNA
  modified_base 6: mod_base = OTHER; note = Uracil
  modified_base 7: mod_base = OTHER; note = Uracil
  modified_base 9: mod_base = OTHER; note = Uracil
  modified_base 11: mod_base = OTHER; note = Uracil
gtaagttctgtccaagcc

SEQ ID NO: 15358 - RNA, 18 nt, synthetic construct
  misc_feature 1..18: note = Description of Artificial Sequence: Synthetic Antisense oligonucleotide
  modified_base 1..2: mod_base = OTHER; note = bicyclic nucleic acid (BNA)
  modified_base 6: mod_base = OTHER; note = bicyclic nucleic acid (BNA)
  modified_base 10: mod_base = OTHER; note = bicyclic nucleic acid (BNA)
  modified_base 17..18: mod_base = OTHER; note = bicyclic nucleic acid (BNA)
  source 1..18: mol_type = other RNA
agtcggtaagttctgtcc

SEQ ID NO: 15359 - RNA, 18 nt, synthetic construct
  misc_feature 1..18: note = Description of Artificial Sequence: Synthetic Antisense oligonucleotide
  modified_base 1..2: mod_base = OTHER; note = bicyclic nucleic acid (BNA)
  modified_base 5: mod_base = OTHER; note = bicyclic nucleic acid (BNA)
  modified_base 13: mod_base = OTHER; note = bicyclic nucleic acid (BNA)
  modified_base 17..18: mod_base = OTHER; note = bicyclic nucleic acid (BNA)
  source 1..18: mol_type = other RNA
agtcggtaagttctgtcc

SEQ ID NO: 15360 - RNA, 18 nt, synthetic construct
  misc_feature 1..18: note = Description of Artificial Sequence: Synthetic Antisense oligonucleotide
  modified_base 1..2: mod_base = OTHER; note = bicyclic nucleic acid (BNA)
  modified_base 4: mod_base = OTHER; note = bicyclic nucleic acid (BNA)
  modified_base 15: mod_base = OTHER; note = bicyclic nucleic acid (BNA)
  modified_base 17..18: mod_base = OTHER; note = bicyclic nucleic acid (BNA)
  source 1..18: mol_type = other RNA
agtcggtaagttctgtcc

SEQ ID NO: 15361 - RNA, 18 nt, synthetic construct
  misc_feature 1..18: note = Description of Artificial Sequence: Synthetic Antisense oligonucleotide
  modified_base 1..2: mod_base = OTHER; note = bicyclic nucleic acid (BNA)
  modified_base 5: mod_base = OTHER; note = bicyclic nucleic acid (BNA)
  modified_base 10: mod_base = OTHER; note = bicyclic nucleic acid (BNA)
  modified_base 17..18: mod_base = OTHER; note = bicyclic nucleic acid (BNA)
  source 1..18: mol_type = other RNA
agtcggtaagttctgtcc

SEQ ID NO: 15362 - RNA, 18 nt, synthetic construct
  misc_feature 1..18: note = Description of Artificial Sequence: Synthetic Antisense oligonucleotide
  modified_base 1..2: mod_base = OTHER; note = bicyclic nucleic acid (BNA)
  modified_base 6: mod_base = OTHER; note = bicyclic nucleic acid (BNA)
  modified_base 13: mod_base = OTHER; note = bicyclic nucleic acid (BNA)
  modified_base 17..18: mod_base = OTHER; note = bicyclic nucleic acid (BNA)
  source 1..18: mol_type = other RNA
agtcggtaagttctgtcc

SEQ ID NO: 15363 - RNA, 18 nt, synthetic construct
  misc_feature 1..18: note = Description of Artificial Sequence: Synthetic Antisense oligonucleotide
  modified_base 1..2: mod_base = OTHER; note = bicyclic nucleic acid (BNA)
  modified_base 10: mod_base = OTHER; note = bicyclic nucleic acid (BNA)
  modified_base 15: mod_base = OTHER; note = bicyclic nucleic acid (BNA)
  modified_base 17..18: mod_base = OTHER; note = bicyclic nucleic acid (BNA)
  source 1..18: mol_type = other RNA
agtcggtaagttctgtcc

SEQ ID NO: 15364 - RNA, 18 nt, synthetic construct
  misc_feature 1..18: note = Description of Artificial Sequence: Synthetic Antisense oligonucleotide
  modified_base 1..2: mod_base = OTHER; note = bicyclic nucleic acid (BNA)
  modified_base 13: mod_base = OTHER; note = bicyclic nucleic acid (BNA)
  modified_base 15: mod_base = OTHER; note = bicyclic nucleic acid (BNA)
  modified_base 17..18: mod_base = OTHER; note = bicyclic nucleic acid (BNA)
  source 1..18: mol_type = other RNA
agtcggtaagttctgtcc

SEQ ID NO: 15365 - RNA, 18 nt, synthetic construct
  misc_feature 1..18: note = Description of Artificial Sequence: Synthetic Antisense oligonucleotide
  modified_base 1..2: mod_base = OTHER; note = bicyclic nucleic acid (BNA)
  modified_base 5..6: mod_base = OTHER; note = bicyclic nucleic acid (BNA)
  modified_base 17..18: mod_base = OTHER; note = bicyclic nucleic acid (BNA)
  source 1..18: mol_type = other RNA
agtcggtaagttctgtcc

SEQ ID NO: 15366 - RNA, 18 nt, synthetic construct
  misc_feature 1..18: note = Description of Artificial Sequence: Synthetic Antisense oligonucleotide
  modified_base 1..2: mod_base = OTHER; note = bicyclic nucleic acid (BNA)
  modified_base 5: mod_base = OTHER; note = bicyclic nucleic acid (BNA)
  modified_base 15: mod_base = OTHER; note = bicyclic nucleic acid (BNA)
  modified_base 17..18: mod_base = OTHER; note = bicyclic nucleic acid (BNA)
  source 1..18: mol_type = other RNA
agtcggtaagttctgtcc

SEQ ID NO: 15367 - RNA, 18 nt, synthetic construct
  misc_feature 1..18: note = Description of Artificial Sequence: Synthetic Antisense oligonucleotide
  modified_base 1..2: mod_base = OTHER; note = bicyclic nucleic acid (BNA)
  modified_base 4: mod_base = OTHER; note = bicyclic nucleic acid (BNA)
  modified_base 10: mod_base = OTHER; note = bicyclic nucleic acid (BNA)
  modified_base 17..18: mod_base = OTHER; note = bicyclic nucleic acid (BNA)
  source 1..18: mol_type = other RNA
agtcggtaagttctgtcc

SEQ ID NO: 15368 - RNA, 18 nt, synthetic construct
  misc_feature 1..18: note = Description of Artificial Sequence: Synthetic Antisense oligonucleotide
  modified_base 1..2: mod_base = OTHER; note = bicyclic nucleic acid (BNA)
  modified_base 4: mod_base = OTHER; note = bicyclic nucleic acid (BNA)
  modified_base 6: mod_base = OTHER; note = bicyclic nucleic acid (BNA)
  modified_base 17..18: mod_base = OTHER; note = bicyclic nucleic acid (BNA)
  source 1..18: mol_type = other RNA
agtcggtaagttctgtcc

SEQ ID NO: 15369 - RNA, 18 nt, synthetic construct
  misc_feature 1..18: note = Description of Artificial Sequence: Synthetic Antisense oligonucleotide
  modified_base 1..2: mod_base = OTHER; note = bicyclic nucleic acid (BNA)
  modified_base 4: mod_base = OTHER; note = bicyclic nucleic acid (BNA)
  modified_base 13: mod_base = OTHER; note = bicyclic nucleic acid (BNA)
  modified_base 17..18: mod_base = OTHER; note = bicyclic nucleic acid (BNA)
  source 1..18: mol_type = other RNA
agtcggtaagttctgtcc

SEQ ID NO: 15370 - RNA, 18 nt, synthetic construct
  misc_feature 1..18: note = Description of Artificial Sequence: Synthetic Antisense oligonucleotide
  modified_base 1..2: mod_base = OTHER; note = bicyclic nucleic acid (BNA)
  modified_base 6: mod_base = OTHER; note = bicyclic nucleic acid (BNA)
  modified_base 15: mod_base = OTHER; note = bicyclic nucleic acid (BNA)
  modified_base 17..18: mod_base = OTHER; note = bicyclic nucleic acid (BNA)
  source 1..18: mol_type = other RNA
agtcggtaagttctgtcc

SEQ ID NO: 15371 - RNA, 18 nt, synthetic construct
  misc_feature 1..18: note = Description of Artificial Sequence: Synthetic Antisense oligonucleotide
  modified_base 1..2: mod_base = OTHER; note = bicyclic nucleic acid (BNA)
  modified_base 4..5: mod_base = OTHER; note = bicyclic nucleic acid (BNA)
  modified_base 17..18: mod_base = OTHER; note = bicyclic nucleic acid (BNA)
  source 1..18: mol_type = other RNA
agtcggtaagttctgtcc

SEQ ID NO: 15372 - RNA, 18 nt, synthetic construct
  misc_feature 1..18: note = Description of Artificial Sequence: Synthetic Antisense oligonucleotide
  modified_base 1..2: mod_base = OTHER; note = bicyclic nucleic acid (BNA)
  modified_base 10: mod_base = OTHER; note = bicyclic nucleic acid (BNA)
  modified_base 13: mod_base = OTHER; note = bicyclic nucleic acid (BNA)
  modified_base 17..18: mod_base = OTHER; note = bicyclic nucleic acid (BNA)
  source 1..18: mol_type = other RNA
agtcggtaagttctgtcc

SEQ ID NO: 15373 - DNA, 18 bp, synthetic construct
  misc_feature 1..18: note = Description of Artificial Sequence: Synthetic Antisense oligonucleotide
  misc_feature 1..18: note = Original Sequence: ctguccaagcccgguuga
  modified_base 1..2: mod_base = OTHER; note = bicyclic nucleic acid (BNA)
  modified_base 6: mod_base = OTHER; note = bicyclic nucleic acid (BNA)
  modified_base 10: mod_base = OTHER; note = bicyclic nucleic acid (BNA)
  modified_base 17..18: mod_base = OTHER; note = bicyclic nucleic acid (BNA)
  source 1..18: mol_type = other DNA
  modified_base 4: mod_base = OTHER; note = Uracil
  modified_base 15: mod_base = OTHER; note = Uracil
  modified_base 16: mod_base = OTHER; note = Uracil
ctgtccaagcccggttga

SEQ ID NO: 15374 - DNA, 18 bp, synthetic construct
  misc_feature 1..18: note = Description of Artificial Sequence: Synthetic Antisense oligonucleotide
  misc_feature 1..18: note = Original Sequence: ctguccaagcccgguuga
  modified_base 1..2: mod_base = OTHER; note = bicyclic nucleic acid (BNA)
  modified_base 9: mod_base = OTHER; note = bicyclic nucleic acid (BNA)
  modified_base 14: mod_base = OTHER; note = bicyclic nucleic acid (BNA)
  modified_base 17..18: mod_base = OTHER; note = bicyclic nucleic acid (BNA)
  source 1..18: mol_type = other DNA
  modified_base 4: mod_base = OTHER; note = Uracil
  modified_base 15: mod_base = OTHER; note = Uracil
  modified_base 16: mod_base = OTHER; note = Uracil
ctgtccaagcccggttga

SEQ ID NO: 15375 - DNA, 18 bp, synthetic construct
  misc_feature 1..18: note = Description of Artificial Sequence: Synthetic Antisense oligonucleotide
  misc_feature 1..18: note = Original Sequence: ctguccaagcccgguuga
  modified_base 1..2: mod_base = OTHER; note = bicyclic nucleic acid (BNA)
  modified_base 11..12: mod_base = OTHER; note = bicyclic nucleic acid (BNA)
  modified_base 17..18: mod_base = OTHER; note = bicyclic nucleic acid (BNA)
  source 1..18: mol_type = other DNA
  modified_base 4: mod_base = OTHER; note = Uracil
  modified_base 15: mod_base = OTHER; note = Uracil
  modified_base 16: mod_base = OTHER; note = Uracil
ctgtccaagcccggttga

SEQ ID NO: 15376 - DNA, 18 bp, synthetic construct
  misc_feature 1..18: note = Description of Artificial Sequence: Synthetic Antisense oligonucleotide
  misc_feature 1..18: note = Original Sequence: ctguccaagcccgguuga
  modified_base 1..2: mod_base = OTHER; note = bicyclic nucleic acid (BNA)
  modified_base 5: mod_base = OTHER; note = bicyclic nucleic acid (BNA)
  modified_base 9: mod_base = OTHER; note = bicyclic nucleic acid (BNA)
  modified_base 17..18: mod_base = OTHER; note = bicyclic nucleic acid (BNA)
  source 1..18: mol_type = other DNA
  modified_base 4: mod_base = OTHER; note = Uracil
  modified_base 15: mod_base = OTHER; note = Uracil
  modified_base 16: mod_base = OTHER; note = Uracil
ctgtccaagcccggttga

SEQ ID NO: 15377 - DNA, 18 bp, synthetic construct
  misc_feature 1..18: note = Description of Artificial Sequence: Synthetic Antisense oligonucleotide
  misc_feature 1..18: note = Original Sequence: ctguccaagcccgguuga
  modified_base 1..3: mod_base = OTHER; note = bicyclic nucleic acid (BNA)
  modified_base 9: mod_base = OTHER; note = bicyclic nucleic acid (BNA)
  modified_base 17..18: mod_base = OTHER; note = bicyclic nucleic acid (BNA)
  source 1..18: mol_type = other DNA
  modified_base 4: mod_base = OTHER; note = Uracil
  modified_base 15: mod_base = OTHER; note = Uracil
  modified_base 16: mod_base = OTHER; note = Uracil
ctgtccaagcccggttga

SEQ ID NO: 15378 - DNA, 18 bp, synthetic construct
  misc_feature 1..18: note = Description of Artificial Sequence: Synthetic Antisense oligonucleotide
  misc_feature 1..18: note = Original Sequence: ctguccaagcccgguuga
  modified_base 1..2: mod_base = OTHER; note = bicyclic nucleic acid (BNA)
  modified_base 6: mod_base = OTHER; note = bicyclic nucleic acid (BNA)
  modified_base 14: mod_base = OTHER; note = bicyclic nucleic acid (BNA)
  modified_base 17..18: mod_base = OTHER; note = bicyclic nucleic acid (BNA)
  source 1..18: mol_type = other DNA
  modified_base 4: mod_base = OTHER; note = Uracil
  modified_base 15: mod_base = OTHER; note = Uracil
  modified_base 16: mod_base = OTHER; note = Uracil
ctgtccaagcccggttga

SEQ ID NO: 15379 - DNA, 18 bp, synthetic construct
  misc_feature 1..18: note = Description of Artificial Sequence: Synthetic Antisense oligonucleotide
  misc_feature 1..18: note = Original Sequence: ctguccaagcccgguuga
  modified_base 1..2: mod_base = OTHER; note = bicyclic nucleic acid (BNA)
  modified_base 9..10: mod_base = OTHER; note = bicyclic nucleic acid (BNA)
  modified_base 17..18: mod_base = OTHER; note = bicyclic nucleic acid (BNA)
  source 1..18: mol_type = other DNA
  modified_base 4: mod_base = OTHER; note = Uracil
  modified_base 15: mod_base = OTHER; note = Uracil
  modified_base 16: mod_base = OTHER; note = Uracil
ctgtccaagcccggttga

SEQ ID NO: 15380 - DNA, 18 bp, synthetic construct
  misc_feature 1..18: note = Description of Artificial Sequence: Synthetic Antisense oligonucleotide
  misc_feature 1..18: note = Original Sequence: ctguccaagcccgguuga
  modified_base 1..2: mod_base = OTHER; note = bicyclic nucleic acid (BNA)
  modified_base 5: mod_base = OTHER; note = bicyclic nucleic acid (BNA)
  modified_base 13: mod_base = OTHER; note = bicyclic nucleic acid (BNA)
  modified_base 17..18: mod_base = OTHER; note = bicyclic nucleic acid (BNA)
  source 1..18: mol_type = other DNA
  modified_base 4: mod_base = OTHER; note = Uracil
  modified_base 15: mod_base = OTHER; note = Uracil
  modified_base 16: mod_base = OTHER; note = Uracil
ctgtccaagcccggttga

SEQ ID NO: 15381 - DNA, 18 bp, synthetic construct
  misc_feature 1..18: note = Description of Artificial Sequence: Synthetic Antisense oligonucleotide
  misc_feature 1..18: note = Original Sequence: ctguccaagcccgguuga
  modified_base 1..3: mod_base = OTHER; note = bicyclic nucleic acid (BNA)
  modified_base 13: mod_base = OTHER; note = bicyclic nucleic acid (BNA)
  modified_base 17..18: mod_base = OTHER; note = bicyclic nucleic acid (BNA)
  source 1..18: mol_type = other DNA
  modified_base 4: mod_base = OTHER; note = Uracil
  modified_base 15: mod_base = OTHER; note = Uracil
  modified_base 16: mod_base = OTHER; note = Uracil
ctgtccaagcccggttga

SEQ ID NO: 15382 - DNA, 18 bp, synthetic construct
  misc_feature 1..18: note = Description of Artificial Sequence: Synthetic Antisense oligonucleotide
  misc_feature 1..18: note = Original Sequence: ctguccaagcccgguuga
  modified_base 1..3: mod_base = OTHER; note = bicyclic nucleic acid (BNA)
  modified_base 6: mod_base = OTHER; note = bicyclic nucleic acid (BNA)
  modified_base 17..18: mod_base = OTHER; note = bicyclic nucleic acid (BNA)
  source 1..18: mol_type = other DNA
  modified_base 4: mod_base = OTHER; note = Uracil
  modified_base 15: mod_base = OTHER; note = Uracil
  modified_base 16: mod_base = OTHER; note = Uracil
ctgtccaagcccggttga

SEQ ID NO: 15383 - DNA, 18 bp, synthetic construct
  misc_feature 1..18: note = Description of Artificial Sequence: Synthetic Antisense oligonucleotide
  misc_feature 1..18: note = Original Sequence: ctguccaagcccgguuga
  modified_base 1..2: mod_base = OTHER; note = bicyclic nucleic acid (BNA)
  modified_base 6: mod_base = OTHER; note = bicyclic nucleic acid (BNA)
  modified_base 9: mod_base = OTHER; note = bicyclic nucleic acid (BNA)
  modified_base 17..18: mod_base = OTHER; note = bicyclic nucleic acid (BNA)
  source 1..18: mol_type = other DNA
  modified_base 4: mod_base = OTHER; note = Uracil
  modified_base 15: mod_base = OTHER; note = Uracil
  modified_base 16: mod_base = OTHER; note = Uracil
ctgtccaagcccggttga

SEQ ID NO: 15384 - DNA, 18 bp, synthetic construct
  misc_feature 1..18: note = Description of Artificial Sequence: Synthetic Antisense oligonucleotide
  misc_feature 1..18: note = Original Sequence: ctguccaagcccgguuga
  modified_base 1..2: mod_base = OTHER; note = bicyclic nucleic acid (BNA)
  modified_base 5: mod_base = OTHER; note = bicyclic nucleic acid (BNA)
  modified_base 10: mod_base = OTHER; note = bicyclic nucleic acid (BNA)
  modified_base 17..18: mod_base = OTHER; note = bicyclic nucleic acid (BNA)
  source 1..18: mol_type = other DNA
  modified_base 4: mod_base = OTHER; note = Uracil
  modified_base 15: mod_base = OTHER; note = Uracil
  modified_base 16: mod_base = OTHER; note = Uracil
ctgtccaagcccggttga

SEQ ID NO: 15385 - DNA, 18 bp, synthetic construct
  misc_feature 1..18: note = Description of Artificial Sequence: Synthetic Antisense oligonucleotide
  misc_feature 1..18: note = Original Sequence: ctguccaagcccgguuga
  modified_base 1..3: mod_base = OTHER; note = bicyclic nucleic acid (BNA)
  modified_base 10: mod_base = OTHER; note = bicyclic nucleic acid (BNA)
  modified_base 17..18: mod_base = OTHER; note = bicyclic nucleic acid (BNA)
  source 1..18: mol_type = other DNA
  modified_base 4: mod_base = OTHER; note = Uracil
  modified_base 15: mod_base = OTHER; note = Uracil
  modified_base 16: mod_base = OTHER; note = Uracil
ctgtccaagcccggttga

SEQ ID NO: 15386 - DNA, 18 bp, synthetic construct
  misc_feature 1..18: note = Description of Artificial Sequence: Synthetic Antisense oligonucleotide
  misc_feature 1..18: note = Original Sequence: ctguccaagcccgguuga
  modified_base 1..2: mod_base = OTHER; note = bicyclic nucleic acid (BNA)
  modified_base 13..14: mod_base = OTHER; note = bicyclic nucleic acid (BNA)
  modified_base 17..18: mod_base = OTHER; note = bicyclic nucleic acid (BNA)
  source 1..18: mol_type = other DNA
  modified_base 4: mod_base = OTHER; note = Uracil
  modified_base 15: mod_base = OTHER; note = Uracil
  modified_base 16: mod_base = OTHER; note = Uracil
ctgtccaagcccggttga

SEQ ID NO: 15387 - DNA, 18 bp, synthetic construct
  misc_feature 1..18: note = Description of Artificial Sequence: Synthetic Antisense oligonucleotide
  misc_feature 1..18: note = Original Sequence: ctguccaagcccgguuga
  modified_base 1..2: mod_base = OTHER; note = bicyclic nucleic acid (BNA)
  modified_base 6: mod_base = OTHER; note = bicyclic nucleic acid (BNA)
  modified_base 13: mod_base = OTHER; note = bicyclic nucleic acid (BNA)
  modified_base 17..18: mod_base = OTHER; note = bicyclic nucleic acid (BNA)
  source 1..18: mol_type = other DNA
  modified_base 4: mod_base = OTHER; note = Uracil
  modified_base 15: mod_base = OTHER; note = Uracil
  modified_base 16: mod_base = OTHER; note = Uracil
ctgtccaagcccggttga

SEQ ID NO: 15388 - DNA, 18 bp, synthetic construct
  misc_feature 1..18: note = Description of Artificial Sequence: Synthetic Antisense oligonucleotide
  misc_feature 1..18: note = Original Sequence: ctguccaagcccgguuga
  modified_base 1..2: mod_base = OTHER; note = bicyclic nucleic acid (BNA)
  modified_base 9: mod_base = OTHER; note = bicyclic nucleic acid (BNA)
  modified_base 11: mod_base = OTHER; note = bicyclic nucleic acid (BNA)
  modified_base 17..18: mod_base = OTHER; note = bicyclic nucleic acid (BNA)
  source 1..18: mol_type = other DNA
  modified_base 4: mod_base = OTHER; note = Uracil
  modified_base 15: mod_base = OTHER; note = Uracil
  modified_base 16: mod_base = OTHER; note = Uracil
ctgtccaagcccggttga

SEQ ID NO: 15389 - DNA, 18 bp, synthetic construct
  misc_feature 1..18: note = Description of Artificial Sequence: Synthetic Antisense oligonucleotide
  misc_feature 1..18: note = Original Sequence: ctguccaagcccgguuga
  modified_base 1..2: mod_base = OTHER; note = bicyclic nucleic acid (BNA)
  modified_base 11: mod_base = OTHER; note = bicyclic nucleic acid (BNA)
  modified_base 13: mod_base = OTHER; note = bicyclic nucleic acid (BNA)
  modified_base 17..18: mod_base = OTHER; note = bicyclic nucleic acid (BNA)
  source 1..18: mol_type = other DNA
  modified_base 4: mod_base = OTHER; note = Uracil
  modified_base 15: mod_base = OTHER; note = Uracil
  modified_base 16: mod_base = OTHER; note = Uracil
ctgtccaagcccggttga

SEQ ID NO: 15390 - DNA, 18 bp, synthetic construct
  misc_feature 1..18: note = Description of Artificial Sequence: Synthetic Antisense oligonucleotide
  misc_feature 1..18: note = Original Sequence: ctguccaagcccgguuga
  modified_base 1..2: mod_base = OTHER; note = bicyclic nucleic acid (BNA)
  modified_base 5: mod_base = OTHER; note = bicyclic nucleic acid (BNA)
  modified_base 14: mod_base = OTHER; note = bicyclic nucleic acid (BNA)
  modified_base 17..18: mod_base = OTHER; note = bicyclic nucleic acid (BNA)
  source 1..18: mol_type = other DNA
  modified_base 4: mod_base = OTHER; note = Uracil
  modified_base 15: mod_base = OTHER; note = Uracil
  modified_base 16: mod_base = OTHER; note = Uracil
ctgtccaagcccggttga

SEQ ID NO: 15391 - DNA, 18 bp, synthetic construct
  misc_feature 1..18: note = Description of Artificial Sequence: Synthetic Antisense oligonucleotide
  misc_feature 1..18: note = Original Sequence: ctguccaagcccgguuga
  modified_base 1..3: mod_base = OTHER; note = bicyclic nucleic acid (BNA)
  modified_base 14: mod_base = OTHER; note = bicyclic nucleic acid (BNA)
  modified_base 17..18: mod_base = OTHER; note = bicyclic nucleic acid (BNA)
  source 1..18: mol_type = other DNA
  modified_base 4: mod_base = OTHER; note = Uracil
  modified_base 15: mod_base = OTHER; note = Uracil
  modified_base 16: mod_base = OTHER; note = Uracil
ctgtccaagcccggttga

SEQ ID NO: 15392 - DNA, 18 bp, synthetic construct
  misc_feature 1..18: note = Description of Artificial Sequence: Synthetic Antisense oligonucleotide
  misc_feature 1..18: note = Original Sequence: ctguccaagcccgguuga
  modified_base 1..2: mod_base = OTHER; note = bicyclic nucleic acid (BNA)
  modified_base 10: mod_base = OTHER; note = bicyclic nucleic acid (BNA)
  modified_base 12: mod_base = OTHER; note = bicyclic nucleic acid (BNA)
  modified_base 17..18: mod_base = OTHER; note = bicyclic nucleic acid (BNA)
  source 1..18: mol_type = other DNA
  modified_base 4: mod_base = OTHER; note = Uracil
  modified_base 15: mod_base = OTHER; note = Uracil
  modified_base 16: mod_base = OTHER; note = Uracil
ctgtccaagcccggttga

SEQ ID NO: 15393 - DNA, 18 bp, synthetic construct
  misc_feature 1..18: note = Description of Artificial Sequence: Synthetic Antisense oligonucleotide
  misc_feature 1..18: note = Original Sequence: ctguccaagcccgguuga
  modified_base 1..2: mod_base = OTHER; note = bicyclic nucleic acid (BNA)
  modified_base 12: mod_base = OTHER; note = bicyclic nucleic acid (BNA)
  modified_base 14: mod_base = OTHER; note = bicyclic nucleic acid (BNA)
  modified_base 17..18: mod_base = OTHER; note = bicyclic nucleic acid (BNA)
  source 1..18: mol_type = other DNA
  modified_base 4: mod_base = OTHER; note = Uracil
  modified_base 15: mod_base = OTHER; note = Uracil
  modified_base 16: mod_base = OTHER; note = Uracil
ctgtccaagcccggttga

SEQ ID NO: 15394 - DNA, 18 bp, synthetic construct
  misc_feature 1..18: note = Description of Artificial Sequence: Synthetic Antisense oligonucleotide
  misc_feature 1..18: note = Original Sequence: ctguccaagcccgguuga
  modified_base 1..2: mod_base = OTHER; note = bicyclic nucleic acid (BNA)
  modified_base 5: mod_base = OTHER; note = bicyclic nucleic acid (BNA)
  modified_base 11: mod_base = OTHER; note = bicyclic nucleic acid (BNA)
  modified_base 17..18: mod_base = OTHER; note = bicyclic nucleic acid (BNA)
  source 1..18: mol_type = other DNA
  modified_base 4: mod_base = OTHER; note = Uracil
  modified_base 15: mod_base = OTHER; note = Uracil
  modified_base 16: mod_base = OTHER; note = Uracil
ctgtccaagcccggttga

SEQ ID NO: 15395 - DNA, 18 bp, synthetic construct
  misc_feature 1..18: note = Description of Artificial Sequence: Synthetic Antisense oligonucleotide
  misc_feature 1..18: note = Original Sequence: ctguccaagcccgguuga
  modified_base 1..2: mod_base = OTHER; note = bicyclic nucleic acid (BNA)
  modified_base 6: mod_base = OTHER; note = bicyclic nucleic acid (BNA)
  modified_base 12: mod_base = OTHER; note = bicyclic nucleic acid (BNA)
  modified_base 17..18: mod_base = OTHER; note = bicyclic nucleic acid (BNA)
  source 1..18: mol_type = other DNA
  modified_base 4: mod_base = OTHER; note = Uracil
  modified_base 15: mod_base = OTHER; note = Uracil
  modified_base 16: mod_base = OTHER; note = Uracil
ctgtccaagcccggttga

SEQ ID NO: 15396 - DNA, 18 bp, synthetic construct
  misc_feature 1..18: note = Description of Artificial Sequence: Synthetic Antisense oligonucleotide
  misc_feature 1..18: note = Original Sequence: ctguccaagcccgguuga
  modified_base 1..2: mod_base = OTHER; note = bicyclic nucleic acid (BNA)
  modified_base 5..6: mod_base = OTHER; note = bicyclic nucleic acid (BNA)
  modified_base 17..18: mod_base = OTHER; note = bicyclic nucleic acid (BNA)
  source 1..18: mol_type = other DNA
  modified_base 4: mod_base = OTHER; note = Uracil
  modified_base 15: mod_base = OTHER; note = Uracil
  modified_base 16: mod_base = OTHER; note = Uracil
ctgtccaagcccggttga

SEQ ID NO: 15397 - DNA, 18 bp, synthetic construct
  misc_feature 1..18: note = Description of Artificial Sequence: Synthetic Antisense oligonucleotide
  misc_feature 1..18: note = Original Sequence: ctguccaagcccgguuga
  modified_base 1..2: mod_base = OTHER; note = bicyclic nucleic acid (BNA)
  modified_base 11: mod_base = OTHER; note = bicyclic nucleic acid (BNA)
  modified_base 14: mod_base = OTHER; note = bicyclic nucleic acid (BNA)
  modified_base 17..18: mod_base = OTHER; note = bicyclic nucleic acid (BNA)
  source 1..18: mol_type = other DNA
  modified_base 4: mod_base = OTHER; note = Uracil
  modified_base 15: mod_base = OTHER; note = Uracil
  modified_base 16: mod_base = OTHER; note = Uracil
ctgtccaagcccggttga

SEQ ID NO: 15398 - DNA, 18 bp, synthetic construct
  misc_feature 1..18: note = Description of Artificial Sequence: Synthetic Antisense oligonucleotide
  misc_feature 1..18: note = Original Sequence: ctguccaagcccgguuga
  modified_base 1..2: mod_base = OTHER; note = bicyclic nucleic acid (BNA)
  modified_base 9: mod_base = OTHER; note = bicyclic nucleic acid (BNA)
  modified_base 12: mod_base = OTHER; note = bicyclic nucleic acid (BNA)
  modified_base 17..18: mod_base = OTHER; note = bicyclic nucleic acid (BNA)
  source 1..18: mol_type = other DNA
  modified_base 4: mod_base = OTHER; note = Uracil
  modified_base 15: mod_base = OTHER; note = Uracil
  modified_base 16: mod_base = OTHER; note = Uracil
ctgtccaagcccggttga

SEQ ID NO: 15399 - DNA, 18 bp, synthetic construct
  misc_feature 1..18: note = Description of Artificial Sequence: Synthetic Antisense oligonucleotide
  misc_feature 1..18: note = Original Sequence: ctguccaagcccgguuga
  modified_base 1..3: mod_base = OTHER; note = bicyclic nucleic acid (BNA)
  modified_base 11: mod_base = OTHER; note = bicyclic nucleic acid (BNA)
  modified_base 17..18: mod_base = OTHER; note = bicyclic nucleic acid (BNA)
  source 1..18: mol_type = other DNA
  modified_base 4: mod_base = OTHER; note = Uracil
  modified_base 15: mod_base = OTHER; note = Uracil
  modified_base 16: mod_base = OTHER; note = Uracil
ctgtccaagcccggttga

SEQ ID NO: 15400 - DNA, 18 bp, synthetic construct
  misc_feature 1..18: note = Description of Artificial Sequence: Synthetic Antisense oligonucleotide
  misc_feature 1..18: note = Original Sequence: ctguccaagcccgguuga
  modified_base 1..2: mod_base = OTHER; note = bicyclic nucleic acid (BNA)
  modified_base 10..11: mod_base = OTHER; note = bicyclic nucleic acid (BNA)
  modified_base 17..18: mod_base = OTHER; note = bicyclic nucleic acid (BNA)
  source 1..18: mol_type = other DNA
  modified_base 4: mod_base = OTHER; note = Uracil
  modified_base 15: mod_base = OTHER; note = Uracil
  modified_base 16: mod_base = OTHER; note = Uracil
ctgtccaagcccggttga

SEQ ID NO: 15401 - DNA, 18 bp, synthetic construct
  misc_feature 1..18: note = Description of Artificial Sequence: Synthetic Antisense oligonucleotide
  misc_feature 1..18: note = Original Sequence: ctguccaagcccgguuga
  modified_base 1..2: mod_base = OTHER; note = bicyclic nucleic acid (BNA)
  modified_base 12..13: mod_base = OTHER; note = bicyclic nucleic acid (BNA)
  modified_base 17..18: mod_base = OTHER; note = bicyclic nucleic acid (BNA)
  source 1..18: mol_type = other DNA
  modified_base 4: mod_base = OTHER; note = Uracil
  modified_base 15: mod_base = OTHER; note = Uracil
  modified_base 16: mod_base = OTHER; note = Uracil
ctgtccaagcccggttga

SEQ ID NO: 15402 - DNA, 18 bp, synthetic construct
  misc_feature 1..18: note = Description of Artificial Sequence: Synthetic Antisense oligonucleotide
  misc_feature 1..18: note = Original Sequence: ctguccaagcccgguuga
  modified_base 1..2: mod_base = OTHER; note = bicyclic nucleic acid (BNA)
  modified_base 5: mod_base = OTHER; note = bicyclic nucleic acid (BNA)
  modified_base 12: mod_base = OTHER; note = bicyclic nucleic acid (BNA)
  modified_base 17..18: mod_base = OTHER; note = bicyclic nucleic acid (BNA)
  source 1..18: mol_type = other DNA
  modified_base 4: mod_base = OTHER; note = Uracil
  modified_base 15: mod_base = OTHER; note = Uracil
  modified_base 16: mod_base = OTHER; note = Uracil
ctgtccaagcccggttga

SEQ ID NO: 15403 - DNA, 18 bp, synthetic construct
  misc_feature 1..18: note = Description of Artificial Sequence: Synthetic Antisense oligonucleotide
  misc_feature 1..18: note = Original Sequence: ctguccaagcccgguuga
  modified_base 1..2: mod_base = OTHER; note = bicyclic nucleic acid (BNA)
  modified_base 10: mod_base = OTHER; note = bicyclic nucleic acid (BNA)
  modified_base 14: mod_base = OTHER; note = bicyclic nucleic acid (BNA)
  modified_base 17..18: mod_base = OTHER; note = bicyclic nucleic acid (BNA)
  source 1..18: mol_type = other DNA
  modified_base 4: mod_base = OTHER; note = Uracil
  modified_base 15: mod_base = OTHER; note = Uracil
  modified_base 16: mod_base = OTHER; note = Uracil
ctgtccaagcccggttga

SEQ ID NO: 15404 - DNA, 18 bp, synthetic construct
  misc_feature 1..18: note = Description of Artificial Sequence: Synthetic Antisense oligonucleotide
  misc_feature 1..18: note = Original Sequence: ctguccaagcccgguuga
  modified_base 1..2: mod_base = OTHER; note = bicyclic nucleic acid (BNA)
  modified_base 6: mod_base = OTHER; note = bicyclic nucleic acid (BNA)
  modified_base 11: mod_base = OTHER; note = bicyclic nucleic acid (BNA)
  modified_base 17..18: mod_base = OTHER; note = bicyclic nucleic acid (BNA)
  source 1..18: mol_type = other DNA
  modified_base 4: mod_base = OTHER; note = Uracil
  modified_base 15: mod_base = OTHER; note = Uracil
  modified_base 16: mod_base = OTHER; note = Uracil
ctgtccaagcccggttga

SEQ ID NO: 15405 - DNA, 18 bp, synthetic construct
  misc_feature 1..18: note = Description of Artificial Sequence: Synthetic Antisense oligonucleotide
  misc_feature 1..18: note = Original Sequence: ctguccaagcccgguuga
  modified_base 1..2: mod_base = OTHER; note = bicyclic nucleic acid (BNA)
  modified_base 9: mod_base = OTHER; note = bicyclic nucleic acid (BNA)
  modified_base 13: mod_base = OTHER; note = bicyclic nucleic acid (BNA)
  modified_base 17..18: mod_base = OTHER; note = bicyclic nucleic acid (BNA)
  source 1..18: mol_type = other DNA
  modified_base 4: mod_base = OTHER; note = Uracil
  modified_base 15: mod_base = OTHER; note = Uracil
  modified_base 16: mod_base = OTHER; note = Uracil
ctgtccaagcccggttga

SEQ ID NO: 15406 - DNA, 18 bp, synthetic construct
  misc_feature 1..18: note = Description of Artificial Sequence: Synthetic Antisense oligonucleotide
  misc_feature 1..18: note = Original Sequence: ctguccaagcccgguuga
  modified_base 1..3: mod_base = OTHER; note = bicyclic nucleic acid (BNA)
  modified_base 12: mod_base = OTHER; note = bicyclic nucleic acid (BNA)
  modified_base 17..18: mod_base = OTHER; note = bicyclic nucleic acid (BNA)
  source 1..18: mol_type = other DNA
  modified_base 4: mod_base = OTHER; note = Uracil
  modified_base 15: mod_base = OTHER; note = Uracil
  modified_base 16: mod_base = OTHER; note = Uracil
ctgtccaagcccggttga

SEQ ID NO: 15407 - DNA, 18 bp, synthetic construct
  misc_feature 1..18: note = Description of Artificial Sequence: Synthetic Antisense oligonucleotide
  misc_feature 1..18: note = Original Sequence: ctguccaagcccgguuga
  modified_base 1..3: mod_base = OTHER; note = bicyclic nucleic acid (BNA)
  modified_base 5: mod_base = OTHER; note = bicyclic nucleic acid (BNA)
  modified_base 17..18: mod_base = OTHER; note = bicyclic nucleic acid (BNA)
  source 1..18: mol_type = other DNA
  modified_base 4: mod_base = OTHER; note = Uracil
  modified_base 15: mod_base = OTHER; note = Uracil
  modified_base 16: mod_base = OTHER; note = Uracil
ctgtccaagcccggttga

SEQ ID NO: 15408 - DNA, 18 bp, synthetic construct
  misc_feature 1..18: note = Description of Artificial Sequence: Synthetic Antisense oligonucleotide
  misc_feature 1..18: note = Original Sequence: ctguccaagcccgguuga
  modified_base 1..2: mod_base = OTHER; note = bicyclic nucleic acid (BNA)
  modified_base 10: mod_base = OTHER; note = bicyclic nucleic acid (BNA)
  modified_base 13: mod_base = OTHER; note = bicyclic nucleic acid (BNA)
  modified_base 17..18: mod_base = OTHER; note = bicyclic nucleic acid (BNA)
  source 1..18: mol_type = other DNA
  modified_base 4: mod_base = OTHER; note = Uracil
  modified_base 15: mod_base = OTHER; note = Uracil
  modified_base 16: mod_base = OTHER; note = Uracil
ctgtccaagcccggttga

SEQ ID NO: 15409 - DNA, 20 bp, synthetic construct
  misc_feature 1..20: note = Description of Artificial Sequence: Synthetic Antisense oligonucleotide
  misc_feature 1..20: note = Original Sequence: tcaaggaagauggcauuuct
  modified_base 1..2: mod_base = OTHER; note = bicyclic nucleic acid (BNA)
  modified_base 9: mod_base = OTHER; note = bicyclic nucleic acid (BNA)
  modified_base 19..20: mod_base = OTHER; note = bicyclic nucleic acid (BNA)
  source 1..20: mol_type = other DNA
  modified_base 11: mod_base = OTHER; note = Uracil
  modified_base 16: mod_base = OTHER; note = Uracil
  modified_base 17: mod_base = OTHER; note = Uracil
  modified_base 18: mod_base = OTHER; note = Uracil
tcaaggaagatggcatttct

SEQ ID NO: 15410 - DNA, 20 bp, synthetic construct
  misc_feature 1..20: note = Description of Artificial Sequence: Synthetic Antisense oligonucleotide
  misc_feature 1..20: note = Original Sequence: tcaaggaagauggcauuuct
  modified_base 1..2: mod_base = OTHER; note = bicyclic nucleic acid (BNA)
  modified_base 5: mod_base = OTHER; note = bicyclic nucleic acid (BNA)
  modified_base 19..20: mod_base = OTHER; note = bicyclic nucleic acid (BNA)
  source 1..20: mol_type = other DNA
  modified_base 11: mod_base = OTHER; note = Uracil
  modified_base 16: mod_base = OTHER; note = Uracil
  modified_base 17: mod_base = OTHER; note = Uracil
  modified_base 18: mod_base = OTHER; note = Uracil
tcaaggaagatggcatttct

SEQ ID NO: 15411 - DNA, 20 bp, synthetic construct
  misc_feature 1..20: note = Description of Artificial Sequence: Synthetic Antisense oligonucleotide
  misc_feature 1..20: note = Original Sequence: tcaaggaagauggcauuuct
  modified_base 1..2: mod_base = OTHER; note = bicyclic nucleic acid (BNA)
  modified_base 6: mod_base = OTHER; note = bicyclic nucleic acid (BNA)
  modified_base 19..20: mod_base = OTHER; note = bicyclic nucleic acid (BNA)
  source 1..20: mol_type = other DNA
  modified_base 11: mod_base = OTHER; note = Uracil
  modified_base 16: mod_base = OTHER; note = Uracil
  modified_base 17: mod_base = OTHER; note = Uracil
  modified_base 18: mod_base = OTHER; note = Uracil
tcaaggaagatggcatttct

SEQ ID NO: 15412 - DNA, 20 bp, synthetic construct
  misc_feature 1..20: note = Description of Artificial Sequence: Synthetic Antisense oligonucleotide
  misc_feature 1..20: note = Original Sequence: tcaaggaagauggcauuuct
  modified_base 1..2: mod_base = OTHER; note = bicyclic nucleic acid (BNA)
  modified_base 12: mod_base = OTHER; note = bicyclic nucleic acid (BNA)
  modified_base 19..20: mod_base = OTHER; note = bicyclic nucleic acid (BNA)
  source 1..20: mol_type = other DNA
  modified_base 11: mod_base = OTHER; note = Uracil
  modified_base 16: mod_base = OTHER; note = Uracil
  modified_base 17: mod_base = OTHER; note = Uracil
  modified_base 18: mod_base = OTHER; note = Uracil
tcaaggaagatggcatttct

SEQ ID NO: 15413 - DNA, 20 bp, synthetic construct
  misc_feature 1..20: note = Description of Artificial Sequence: Synthetic Antisense oligonucleotide
  misc_feature 1..20: note = Original Sequence: tcaaggaagauggcauuuct
  modified_base 1..2: mod_base = OTHER; note = bicyclic nucleic acid (BNA)
  modified_base 13: mod_base = OTHER; note = bicyclic nucleic acid (BNA)
  modified_base 19..20: mod_base = OTHER; note = bicyclic nucleic acid (BNA)
  source 1..20: mol_type = other DNA
  modified_base 11: mod_base = OTHER; note = Uracil
  modified_base 16: mod_base = OTHER; note = Uracil
  modified_base 17: mod_base = OTHER; note = Uracil
  modified_base 18: mod_base = OTHER; note = Uracil
tcaaggaagatggcatttct

SEQ ID NO: 15414 - DNA, 20 bp, synthetic construct
  misc_feature 1..20: note = Description of Artificial Sequence: Synthetic Antisense oligonucleotide
  misc_feature 1..20: note = Original Sequence: tcaaggaagauggcauuuct
  modified_base 1..2: mod_base = OTHER; note = bicyclic nucleic acid (BNA)
  modified_base 14: mod_base = OTHER; note = bicyclic nucleic acid (BNA)
  modified_base 19..20: mod_base = OTHER; note = bicyclic nucleic acid (BNA)
  source 1..20: mol_type = other DNA
  modified_base 11: mod_base = OTHER; note = Uracil
  modified_base 16: mod_base = OTHER; note = Uracil
  modified_base 17: mod_base = OTHER; note = Uracil
  modified_base 18: mod_base = OTHER; note = Uracil
tcaaggaagatggcatttct

SEQ ID NO: 15415 - DNA, 22 bp, synthetic construct
  misc_feature 1..22: note = Description of Artificial Sequence: Synthetic Antisense oligonucleotide
  misc_feature 1..22: note = Original Sequence: tcaaggaagauggcauuucuag
  modified_base 1..2: mod_base = OTHER; note = bicyclic nucleic acid (BNA)
  modified_base 9: mod_base = OTHER; note = bicyclic nucleic acid (BNA)
  modified_base 21..22: mod_base = OTHER; note = bicyclic nucleic acid (BNA)
  source 1..22: mol_type = other DNA
  modified_base 11: mod_base = OTHER; note = Uracil
  modified_base 16: mod_base = OTHER; note = Uracil
  modified_base 17: mod_base = OTHER; note = Uracil
  modified_base 18: mod_base = OTHER; note = Uracil
  modified_base 20: mod_base = OTHER; note = Uracil
tcaaggaagatggcatttctag

SEQ ID NO: 15416 - DNA, 22 bp, synthetic construct
  misc_feature 1..22: note = Description of Artificial Sequence: Synthetic Antisense oligonucleotide
  misc_feature 1..22: note = Original Sequence: tcaaggaagauggcauuucuag
  modified_base 1..2: mod_base = OTHER; note = bicyclic nucleic acid (BNA)
  modified_base 5: mod_base = OTHER; note = bicyclic nucleic acid (BNA)
  modified_base 21..22: mod_base = OTHER; note = bicyclic nucleic acid (BNA)
  source 1..22: mol_type = other DNA
  modified_base 11: mod_base = OTHER; note = Uracil
  modified_base 16: mod_base = OTHER; note = Uracil
  modified_base 17: mod_base = OTHER; note = Uracil
  modified_base 18: mod_base = OTHER; note = Uracil
  modified_base 20: mod_base = OTHER; note = Uracil
tcaaggaagatggcatttctag

SEQ ID NO: 15417 - DNA, 22 bp, synthetic construct
  misc_feature 1..22: note = Description of Artificial Sequence: Synthetic Antisense oligonucleotide
  misc_feature 1..22: note = Original Sequence: tcaaggaagauggcauuucuag
  modified_base 1..2: mod_base = OTHER; note = bicyclic nucleic acid (BNA)
  modified_base 6: mod_base = OTHER; note = bicyclic nucleic acid (BNA)
  modified_base 21..22: mod_base = OTHER; note = bicyclic nucleic acid (BNA)
  source 1..22: mol_type = other DNA
  modified_base 11: mod_base = OTHER; note = Uracil
  modified_base 16: mod_base = OTHER; note = Uracil
  modified_base 17: mod_base = OTHER; note = Uracil
  modified_base 18: mod_base = OTHER; note = Uracil
  modified_base 20: mod_base = OTHER; note = Uracil
tcaaggaagatggcatttctag

SEQ ID NO: 15418 - DNA, 22 bp, synthetic construct
  misc_feature 1..22: note = Description of Artificial Sequence: Synthetic Antisense oligonucleotide
  misc_feature 1..22: note = Original Sequence: tcaaggaagauggcauuucuag
  modified_base 1..2: mod_base = OTHER; note = bicyclic nucleic acid (BNA)
  modified_base 12: mod_base = OTHER; note = bicyclic nucleic acid (BNA)
  modified_base 21..22: mod_base = OTHER; note = bicyclic nucleic acid (BNA)
  source 1..22: mol_type = other DNA
  modified_base 11: mod_base = OTHER; note = Uracil
  modified_base 16: mod_base = OTHER; note = Uracil
  modified_base 17: mod_base = OTHER; note = Uracil
  modified_base 18: mod_base = OTHER; note = Uracil
  modified_base 20: mod_base = OTHER; note = Uracil
tcaaggaagatggcatttctag

SEQ ID NO: 15419 - DNA, 22 bp, synthetic construct
  misc_feature 1..22: note = Description of Artificial Sequence: Synthetic Antisense oligonucleotide
  misc_feature 1..22: note = Original Sequence: tcaaggaagauggcauuucuag
  modified_base 1..2: mod_base = OTHER; note = bicyclic nucleic acid (BNA)
  modified_base 13: mod_base = OTHER; note = bicyclic nucleic acid (BNA)
  modified_base 21..22: mod_base = OTHER; note = bicyclic nucleic acid (BNA)
  source 1..22: mol_type = other DNA
  modified_base 11: mod_base = OTHER; note = Uracil
  modified_base 16: mod_base = OTHER; note = Uracil
  modified_base 17: mod_base = OTHER; note = Uracil
  modified_base 18: mod_base = OTHER; note = Uracil
  modified_base 20: mod_base = OTHER; note = Uracil
tcaaggaagatggcatttctag

SEQ ID NO: 15420 - DNA, 22 bp, synthetic construct
  misc_feature 1..22: note = Description of Artificial Sequence: Synthetic Antisense oligonucleotide
  misc_feature 1..22: note = Original Sequence: tcaaggaagauggcauuucuag
  modified_base 1..2: mod_base = OTHER; note = bicyclic nucleic acid (BNA)
  modified_base 19: mod_base = OTHER; note = bicyclic nucleic acid (BNA)
  modified_base 21..22: mod_base = OTHER; note = bicyclic nucleic acid (BNA)
  source 1..22: mol_type = other DNA
  modified_base 11: mod_base = OTHER; note = Uracil
  modified_base 16: mod_base = OTHER; note = Uracil
  modified_base 17: mod_base = OTHER; note = Uracil
  modified_base 18: mod_base = OTHER; note = Uracil
  modified_base 20: mod_base = OTHER; note = Uracil
tcaaggaagatggcatttctag

SEQ ID NO: 15421 - DNA, 22 bp, synthetic construct
  misc_feature 1..22: note = Description of Artificial Sequence: Synthetic Antisense oligonucleotide
  misc_feature 1..22: note = Original Sequence: tcaaggaagauggcauuucuag
  modified_base 1..2: mod_base = OTHER; note = bicyclic nucleic acid (BNA)
  modified_base 14: mod_base = OTHER; note = bicyclic nucleic acid (BNA)
  modified_base 21..22: mod_base = OTHER; note = bicyclic nucleic acid (BNA)
  source 1..22: mol_type = other DNA
  modified_base 11: mod_base = OTHER; note = Uracil
  modified_base 16: mod_base = OTHER; note = Uracil
  modified_base 17: mod_base = OTHER; note = Uracil
  modified_base 18: mod_base = OTHER; note = Uracil
  modified_base 20: mod_base = OTHER; note = Uracil
tcaaggaagatggcatttctag

SEQ ID NO: 15422 - DNA, 20 bp, synthetic construct
  misc_feature 1..20: note = Description of Artificial Sequence: Synthetic Antisense oligonucleotide
  misc_feature 1..20: note = Original Sequence: tcaaggaagauggcauuuct
  modified_base 1..2: mod_base = OTHER; note = bicyclic nucleic acid (BNA)
  modified_base 9: mod_base = OTHER; note = bicyclic nucleic acid (BNA)
  modified_base 14: mod_base = OTHER; note = bicyclic nucleic acid (BNA)
  modified_base 19..20: mod_base = OTHER; note = bicyclic nucleic acid (BNA)
  source 1..20: mol_type = other DNA
  modified_base 11: mod_base = OTHER; note = Uracil
  modified_base 16: mod_base = OTHER; note = Uracil
  modified_base 17: mod_base = OTHER; note = Uracil
  modified_base 18: mod_base = OTHER; note = Uracil
tcaaggaagatggcatttct

SEQ ID NO: 15423 - DNA, 20 bp, synthetic construct
  misc_feature 1..20: note = Description of Artificial Sequence: Synthetic Antisense oligonucleotide
  misc_feature 1..20: note = Original Sequence: tcaaggaagauggcauuuct
  modified_base 1..2: mod_base = OTHER; note = bicyclic nucleic acid (BNA)
  modified_base 5: mod_base = OTHER; note = bicyclic nucleic acid (BNA)
  modified_base 9: mod_base = OTHER; note = bicyclic nucleic acid (BNA)
  modified_base 19..20: mod_base = OTHER; note = bicyclic nucleic acid (BNA)
  source 1..20: mol_type = other DNA
  modified_base 11: mod_base = OTHER; note = Uracil
  modified_base 16: mod_base = OTHER; note = Uracil
  modified_base 17: mod_base = OTHER; note = Uracil
  modified_base 18: mod_base = OTHER; note = Uracil
tcaaggaagatggcatttct

SEQ ID NO: 15424 - DNA, 20 bp, synthetic construct
  misc_feature 1..20: note = Description of Artificial Sequence: Synthetic Antisense oligonucleotide
  misc_feature 1..20: note = Original Sequence: tcaaggaagauggcauuuct
  modified_base 1..2: mod_base = OTHER; note = bicyclic nucleic acid (BNA)
  modified_base 6: mod_base = OTHER; note = bicyclic nucleic acid (BNA)
  modified_base 14: mod_base = OTHER; note = bicyclic nucleic acid (BNA)
  modified_base 19..20: mod_base = OTHER; note = bicyclic nucleic acid (BNA)
  source 1..20: mol_type = other DNA
  modified_base 11: mod_base = OTHER; note = Uracil
  modified_base 16: mod_base = OTHER; note = Uracil
  modified_base 17: mod_base = OTHER; note = Uracil
  modified_base 18: mod_base = OTHER; note = Uracil
tcaaggaagatggcatttct

SEQ ID NO: 15425 - DNA, 20 bp, synthetic construct
  misc_feature 1..20: note = Description of Artificial Sequence: Synthetic Antisense oligonucleotide
  misc_feature 1..20: note = Original Sequence: tcaaggaagauggcauuuct
  modified_base 1..2: mod_base = OTHER; note = bicyclic nucleic acid (BNA)
  modified_base 5: mod_base = OTHER; note = bicyclic nucleic acid (BNA)
  modified_base 13: mod_base = OTHER; note = bicyclic nucleic acid (BNA)
  modified_base 19..20: mod_base = OTHER; note = bicyclic nucleic acid (BNA)
  source 1..20: mol_type = other DNA
  modified_base 11: mod_base = OTHER; note = Uracil
  modified_base 16: mod_base = OTHER; note = Uracil
  modified_base 17: mod_base = OTHER; note = Uracil
  modified_base 18: mod_base = OTHER; note = Uracil
tcaaggaagatggcatttct

SEQ ID NO: 15426 - DNA, 20 bp, synthetic construct
  misc_feature 1..20: note = Description of Artificial Sequence: Synthetic Antisense oligonucleotide
  misc_feature 1..20: note = Original Sequence: tcaaggaagauggcauuuct
  modified_base 1..2: mod_base = OTHER; note = bicyclic nucleic acid (BNA)
  modified_base 6: mod_base = OTHER; note = bicyclic nucleic acid (BNA)
  modified_base 9: mod_base = OTHER; note = bicyclic nucleic acid (BNA)
  modified_base 19..20: mod_base = OTHER; note = bicyclic nucleic acid (BNA)
  source 1..20: mol_type = other DNA
  modified_base 11: mod_base = OTHER; note = Uracil
  modified_base 16: mod_base = OTHER; note = Uracil
  modified_base 17: mod_base = OTHER; note = Uracil
  modified_base 18: mod_base = OTHER; note = Uracil
tcaaggaagatggcatttct

SEQ ID NO: 15427 - DNA, 20 bp, synthetic construct
  misc_feature 1..20: note = Description of Artificial Sequence: Synthetic Antisense oligonucleotide
  misc_feature 1..20: note = Original Sequence: tcaaggaagauggcauuuct
  modified_base 1..2: mod_base = OTHER; note = bicyclic nucleic acid (BNA)
  modified_base 13..14: mod_base = OTHER; note = bicyclic nucleic acid (BNA)
  modified_base 19..20: mod_base = OTHER; note = bicyclic nucleic acid (BNA)
  source 1..20: mol_type = other DNA
  modified_base 11: mod_base = OTHER; note = Uracil
  modified_base 16: mod_base = OTHER; note = Uracil
  modified_base 17: mod_base = OTHER; note = Uracil
  modified_base 18: mod_base = OTHER; note = Uracil
tcaaggaagatggcatttct

SEQ ID NO: 15428 - DNA, 20 bp, synthetic construct
  misc_feature 1..20: note = Description of Artificial Sequence: Synthetic Antisense oligonucleotide
  misc_feature 1..20: note = Original Sequence: tcaaggaagauggcauuuct
  modified_base 1..2: mod_base = OTHER; note = bicyclic nucleic acid (BNA)
  modified_base 6: mod_base = OTHER; note = bicyclic nucleic acid (BNA)
  modified_base 13: mod_base = OTHER; note = bicyclic nucleic acid (BNA)
  modified_base 19..20: mod_base = OTHER; note = bicyclic nucleic acid (BNA)
  source 1..20: mol_type = other DNA
  modified_base 11: mod_base = OTHER; note = Uracil
  modified_base 16: mod_base = OTHER; note = Uracil
  modified_base 17: mod_base = OTHER; note = Uracil
  modified_base 18: mod_base = OTHER; note = Uracil
tcaaggaagatggcatttct

SEQ ID NO: 15429 - DNA, 20 bp, synthetic construct
  misc_feature 1..20: note = Description of Artificial Sequence: Synthetic Antisense oligonucleotide
  misc_feature 1..20: note = Original Sequence: tcaaggaagauggcauuuct
  modified_base 1..2: mod_base = OTHER; note = bicyclic nucleic acid (BNA)
  modified_base 5: mod_base = OTHER; note = bicyclic nucleic acid (BNA)
  modified_base 14: mod_base = OTHER; note = bicyclic nucleic acid (BNA)
  modified_base 19..20: mod_base = OTHER; note = bicyclic nucleic acid (BNA)
  source 1..20: mol_type = other DNA
  modified_base 11: mod_base = OTHER; note = Uracil
  modified_base 16: mod_base = OTHER; note = Uracil
  modified_base 17: mod_base = OTHER; note = Uracil
  modified_base 18: mod_base = OTHER; note = Uracil
tcaaggaagatggcatttct

SEQ ID NO: 15430 - DNA, 20 bp, synthetic construct
  misc_feature 1..20: note = Description of Artificial Sequence: Synthetic Antisense oligonucleotide
  misc_feature 1..20: note = Original Sequence: tcaaggaagauggcauuuct
  modified_base 1..2: mod_base = OTHER; note = bicyclic nucleic acid (BNA)
  modified_base 12: mod_base = OTHER; note = bicyclic nucleic acid (BNA)
  modified_base 14: mod_base = OTHER; note = bicyclic nucleic acid (BNA)
  modified_base 19..20: mod_base = OTHER; note = bicyclic nucleic acid (BNA)
  source 1..20: mol_type = other DNA
  modified_base 11: mod_base = OTHER; note = Uracil
  modified_base 16: mod_base = OTHER; note = Uracil
  modified_base 17: mod_base = OTHER; note = Uracil
  modified_base 18: mod_base = OTHER; note = Uracil
tcaaggaagatggcatttct

SEQ ID NO: 15431 - DNA, 20 bp, synthetic construct
  misc_feature 1..20: note = Description of Artificial Sequence: Synthetic Antisense oligonucleotide
  misc_feature 1..20: note = Original Sequence: tcaaggaagauggcauuuct
  modified_base 1..2: mod_base = OTHER; note = bicyclic nucleic acid (BNA)
  modified_base 6: mod_base = OTHER; note = bicyclic nucleic acid (BNA)
  modified_base 12: mod_base = OTHER; note = bicyclic nucleic acid (BNA)
  modified_base 19..20: mod_base = OTHER; note = bicyclic nucleic acid (BNA)
  source 1..20: mol_type = other DNA
  modified_base 11: mod_base = OTHER; note = Uracil
  modified_base 16: mod_base = OTHER; note = Uracil
  modified_base 17: mod_base = OTHER; note = Uracil
  modified_base 18: mod_base = OTHER; note = Uracil
tcaaggaagatggcatttct

SEQ ID NO: 15432 - DNA, 20 bp, synthetic construct
  misc_feature 1..20: note = Description of Artificial Sequence: Synthetic Antisense oligonucleotide
  misc_feature 1..20: note = Original Sequence: tcaaggaagauggcauuuct
  modified_base 1..2: mod_base = OTHER; note = bicyclic nucleic acid (BNA)
  modified_base 5..6: mod_base = OTHER; note = bicyclic nucleic acid (BNA)
  modified_base 19..20: mod_base = OTHER; note = bicyclic nucleic acid (BNA)
  source 1..20: mol_type = other DNA
  modified_base 11: mod_base = OTHER; note = Uracil
  modified_base 16: mod_base = OTHER; note = Uracil
  modified_base 17: mod_base = OTHER; note = Uracil
  modified_base 18: mod_base = OTHER; note = Uracil
tcaaggaagatggcatttct

SEQ ID NO: 15433 - DNA, 20 bp, synthetic construct
  misc_feature 1..20: note = Description of Artificial Sequence: Synthetic Antisense oligonucleotide
  misc_feature 1..20: note = Original Sequence: tcaaggaagauggcauuuct
  modified_base 1..2: mod_base = OTHER; note = bicyclic nucleic acid (BNA)
  modified_base 9: mod_base = OTHER; note = bicyclic nucleic acid (BNA)
  modified_base 12: mod_base = OTHER; note = bicyclic nucleic acid (BNA)
  modified_base 19..20: mod_base = OTHER; note = bicyclic nucleic acid (BNA)
  source 1..20: mol_type = other DNA
  modified_base 11: mod_base = OTHER; note = Uracil
  modified_base 16: mod_base = OTHER; note = Uracil
  modified_base 17: mod_base = OTHER; note = Uracil
  modified_base 18: mod_base = OTHER; note = Uracil
tcaaggaagatggcatttct

SEQ ID NO: 15434 - DNA, 20 bp, synthetic construct
  misc_feature 1..20: note = Description of Artificial Sequence: Synthetic Antisense oligonucleotide
  misc_feature 1..20: note = Original Sequence: tcaaggaagauggcauuuct
  modified_base 1..2: mod_base = OTHER; note = bicyclic nucleic acid (BNA)
  modified_base 12..13: mod_base = OTHER; note = bicyclic nucleic acid (BNA)
  modified_base 19..20: mod_base = OTHER; note = bicyclic nucleic acid (BNA)
  source 1..20: mol_type = other DNA
  modified_base 11: mod_base = OTHER; note = Uracil
  modified_base 16: mod_base = OTHER; note = Uracil
  modified_base 17: mod_base = OTHER; note = Uracil
  modified_base 18: mod_base = OTHER; note = Uracil
tcaaggaagatggcatttct

SEQ ID NO: 15435 - DNA, 20 bp, synthetic construct
  misc_feature 1..20: note = Description of Artificial Sequence: Synthetic Antisense oligonucleotide
  misc_feature 1..20: note = Original Sequence: tcaaggaagauggcauuuct
  modified_base 1..2: mod_base = OTHER; note = bicyclic nucleic acid (BNA)
  modified_base 5: mod_base = OTHER; note = bicyclic nucleic acid (BNA)
  modified_base 12: mod_base = OTHER; note = bicyclic nucleic acid (BNA)
  modified_base 19..20: mod_base = OTHER; note = bicyclic nucleic acid (BNA)
  source 1..20: mol_type = other DNA
  modified_base 11: mod_base = OTHER; note = Uracil
  modified_base 16: mod_base = OTHER; note = Uracil
  modified_base 17: mod_base = OTHER; note = Uracil
  modified_base 18: mod_base = OTHER; note = Uracil
tcaaggaagatggcatttct

SEQ ID NO: 15436 - DNA, 20 bp, synthetic construct
  misc_feature 1..20: note = Description of Artificial Sequence: Synthetic Antisense oligonucleotide
  misc_feature 1..20: note = Original Sequence: tcaaggaagauggcauuuct
  modified_base 1..2: mod_base = OTHER; note = bicyclic nucleic acid (BNA)
  modified_base 9: mod_base = OTHER; note = bicyclic nucleic acid (BNA)
  modified_base 13: mod_base = OTHER; note = bicyclic nucleic acid (BNA)
  modified_base 19..20: mod_base = OTHER; note = bicyclic nucleic acid (BNA)
  source 1..20: mol_type = other DNA
  modified_base 11: mod_base = OTHER; note = Uracil
  modified_base 16: mod_base = OTHER; note = Uracil
  modified_base 17: mod_base = OTHER; note = Uracil
  modified_base 18: mod_base = OTHER; note = Uracil
tcaaggaagatggcatttct

SEQ ID NO: 15437 - DNA, 22 bp, synthetic construct
  misc_feature 1..22: note = Description of Artificial Sequence: Synthetic Antisense oligonucleotide
  misc_feature 1..22: note = Original Sequence: tcaaggaagauggcauuucuag
  modified_base 1..2: mod_base = OTHER; note = bicyclic nucleic acid (BNA)
  modified_base 9: mod_base = OTHER; note = bicyclic nucleic acid (BNA)
  modified_base 14: mod_base = OTHER; note = bicyclic nucleic acid (BNA)
  modified_base 21..22: mod_base = OTHER; note = bicyclic nucleic acid (BNA)
  source 1..22: mol_type = other DNA
  modified_base 11: mod_base = OTHER; note = Uracil
  modified_base 16: mod_base = OTHER; note = Uracil
  modified_base 17: mod_base = OTHER; note = Uracil
  modified_base 18: mod_base = OTHER; note = Uracil
  modified_base 20: mod_base = OTHER; note = Uracil
tcaaggaagatggcatttctag

SEQ ID NO: 15438 - DNA, 22 bp, synthetic construct
  misc_feature 1..22: note = Description of Artificial Sequence: Synthetic Antisense oligonucleotide
  misc_feature 1..22: note = Original Sequence: tcaaggaagauggcauuucuag
  modified_base 1..2: mod_base = OTHER; note = bicyclic nucleic acid (BNA)
  modified_base 5: mod_base = OTHER; note = bicyclic nucleic acid (BNA)
  modified_base 9: mod_base = OTHER; note = bicyclic nucleic acid (BNA)
  modified_base 21..22: mod_base = OTHER; note = bicyclic nucleic acid (BNA)
  source 1..22: mol_type = other DNA
  modified_base 11: mod_base = OTHER; note = Uracil
  modified_base 16: mod_base = OTHER; note = Uracil
  modified_base 17: mod_base = OTHER; note = Uracil
  modified_base 18: mod_base = OTHER; note = Uracil
  modified_base 20: mod_base = OTHER; note = Uracil
tcaaggaagatggcatttctag

SEQ ID NO: 15439 - DNA, 22 bp, synthetic construct
  misc_feature 1..22: note = Description of Artificial Sequence: Synthetic Antisense oligonucleotide
  misc_feature 1..22: note = Original Sequence: tcaaggaagauggcauuucuag
  modified_base 1..2: mod_base = OTHER; note = bicyclic nucleic acid (BNA)
  modified_base 5: mod_base = OTHER; note = bicyclic nucleic acid (BNA)
  modified_base 19: mod_base = OTHER; note = bicyclic nucleic acid (BNA)
  modified_base 21..22: mod_base = OTHER; note = bicyclic nucleic acid (BNA)
  source 1..22: mol_type = other DNA
  modified_base 11: mod_base = OTHER; note = Uracil
  modified_base 16: mod_base = OTHER; note = Uracil
  modified_base 17: mod_base = OTHER; note = Uracil
  modified_base 18: mod_base = OTHER; note = Uracil
  modified_base 20: mod_base = OTHER; note = Uracil
tcaaggaagatggcatttctag

SEQ ID NO: 15440 - DNA, 22 bp, synthetic construct
  misc_feature 1..22: note = Description of Artificial Sequence: Synthetic Antisense oligonucleotide
  misc_feature 1..22: note = Original Sequence: tcaaggaagauggcauuucuag
  modified_base 1..2: mod_base = OTHER; note = bicyclic nucleic acid (BNA)
  modified_base 6: mod_base = OTHER; note = bicyclic nucleic acid (BNA)
  modified_base 14: mod_base = OTHER; note = bicyclic nucleic acid (BNA)
  modified_base 21..22: mod_base = OTHER; note = bicyclic nucleic acid (BNA)
  source 1..22: mol_type = other DNA
  modified_base 11: mod_base = OTHER; note = Uracil
  modified_base 16: mod_base = OTHER; note = Uracil
  modified_base 17: mod_base = OTHER; note = Uracil
  modified_base 18: mod_base = OTHER; note = Uracil
  modified_base 20: mod_base = OTHER; note = Uracil
tcaaggaagatggcatttctag

SEQ ID NO: 15441 - DNA, 22 bp, synthetic construct
  misc_feature 1..22: note = Description of Artificial Sequence: Synthetic Antisense oligonucleotide
  misc_feature 1..22: note = Original Sequence: tcaaggaagauggcauuucuag
  modified_base 1..2: mod_base = OTHER; note = bicyclic nucleic acid (BNA)
  modified_base 5: mod_base = OTHER; note = bicyclic nucleic acid (BNA)
  modified_base 13: mod_base = OTHER; note = bicyclic nucleic acid (BNA)
  modified_base 21..22: mod_base = OTHER; note = bicyclic nucleic acid (BNA)
  source 1..22: mol_type = other DNA
  modified_base 11: mod_base = OTHER; note = Uracil
  modified_base 16: mod_base = OTHER; note = Uracil
  modified_base 17: mod_base = OTHER; note = Uracil
  modified_base 18: mod_base = OTHER; note = Uracil
  modified_base 20: mod_base = OTHER; note = Uracil
tcaaggaagatggcatttctag

SEQ ID NO: 15442 - DNA, 22 bp, synthetic construct
  misc_feature 1..22: note = Description of Artificial Sequence: Synthetic Antisense oligonucleotide
  misc_feature 1..22: note = Original Sequence: tcaaggaagauggcauuucuag
  modified_base 1..2: mod_base = OTHER; note = bicyclic nucleic acid (BNA)
  modified_base 6: mod_base = OTHER; note = bicyclic nucleic acid (BNA)
  modified_base 9: mod_base = OTHER; note = bicyclic nucleic acid (BNA)
  modified_base 21..22: mod_base = OTHER; note = bicyclic nucleic acid (BNA)
  source 1..22: mol_type = other DNA
  modified_base 11: mod_base = OTHER; note = Uracil
  modified_base 16: mod_base = OTHER; note = Uracil
  modified_base 17: mod_base = OTHER; note = Uracil
  modified_base 18: mod_base = OTHER; note = Uracil
  modified_base 20: mod_base = OTHER; note = Uracil
tcaaggaagatggcatttctag

SEQ ID NO: 15443 - DNA, 22 bp, synthetic construct
  misc_feature 1..22: note = Description of Artificial Sequence: Synthetic Antisense oligonucleotide
  misc_feature 1..22: note = Original Sequence: tcaaggaagauggcauuucuag
  modified_base 1..2: mod_base = OTHER; note = bicyclic nucleic acid (BNA)
  modified_base 13..14: mod_base = OTHER; note = bicyclic nucleic acid (BNA)
  modified_base 21..22: mod_base = OTHER; note = bicyclic nucleic acid (BNA)
  source 1..22: mol_type = other DNA
  modified_base 11: mod_base = OTHER; note = Uracil
  modified_base 16: mod_base = OTHER; note = Uracil
  modified_base 17: mod_base = OTHER; note = Uracil
  modified_base 18: mod_base = OTHER; note = Uracil
  modified_base 20: mod_base = OTHER; note = Uracil
tcaaggaagatggcatttctag

SEQ ID NO: 15444 - DNA, 22 bp, synthetic construct
  misc_feature 1..22: note = Description of Artificial Sequence: Synthetic Antisense oligonucleotide
  misc_feature 1..22: note = Original Sequence: tcaaggaagauggcauuucuag
  modified_base 1..2: mod_base = OTHER; note = bicyclic nucleic acid (BNA)
  modified_base 6: mod_base = OTHER; note = bicyclic nucleic acid (BNA)
  modified_base 13: mod_base = OTHER; note = bicyclic nucleic acid (BNA)
  modified_base 21..22: mod_base = OTHER; note = bicyclic nucleic acid (BNA)
  source 1..22: mol_type = other DNA
  modified_base 11: mod_base = OTHER; note = Uracil
  modified_base 16: mod_base = OTHER; note = Uracil
  modified_base 17: mod_base = OTHER; note = Uracil
  modified_base 18: mod_base = OTHER; note = Uracil
  modified_base 20: mod_base = OTHER; note = Uracil
tcaaggaagatggcatttctag

SEQ ID NO: 15445 - DNA, 22 bp, synthetic construct
  misc_feature 1..22: note = Description of Artificial Sequence: Synthetic Antisense oligonucleotide
  misc_feature 1..22: note = Original Sequence: tcaaggaagauggcauuucuag
  modified_base 1..2: mod_base = OTHER; note = bicyclic nucleic acid (BNA)
  modified_base 6: mod_base = OTHER; note = bicyclic nucleic acid (BNA)
  modified_base 19: mod_base = OTHER; note = bicyclic nucleic acid (BNA)
  modified_base 21..22: mod_base = OTHER; note = bicyclic nucleic acid (BNA)
  source 1..22: mol_type = other DNA
  modified_base 11: mod_base = OTHER; note = Uracil
  modified_base 16: mod_base = OTHER; note = Uracil
  modified_base 17: mod_base = OTHER; note = Uracil
  modified_base 18: mod_base = OTHER; note = Uracil
  modified_base 20: mod_base = OTHER; note = Uracil
tcaaggaagatggcatttctag

SEQ ID NO: 15446 - DNA, 22 bp, synthetic construct
  misc_feature 1..22: note = Description of Artificial Sequence: Synthetic Antisense oligonucleotide
  misc_feature 1..22: note = Original Sequence: tcaaggaagauggcauuucuag
  modified_base 1..2: mod_base = OTHER; note = bicyclic nucleic acid (BNA)
  modified_base 5: mod_base = OTHER; note = bicyclic nucleic acid (BNA)
  modified_base 14: mod_base = OTHER; note = bicyclic nucleic acid (BNA)
  modified_base 21..22: mod_base = OTHER; note = bicyclic nucleic acid (BNA)
  source 1..22: mol_type = other DNA
  modified_base 11: mod_base = OTHER; note = Uracil
  modified_base 16: mod_base = OTHER; note = Uracil
  modified_base 17: mod_base = OTHER; note = Uracil
  modified_base 18: mod_base = OTHER; note = Uracil
  modified_base 20: mod_base = OTHER; note = Uracil
tcaaggaagatggcatttctag

SEQ ID NO: 15447 - DNA, 22 bp, synthetic construct
  misc_feature 1..22: note = Description of Artificial Sequence: Synthetic Antisense oligonucleotide
  misc_feature 1..22: note = Original Sequence: tcaaggaagauggcauuucuag
  modified_base 1..2: mod_base = OTHER; note = bicyclic nucleic acid (BNA)
  modified_base 12: mod_base = OTHER; note = bicyclic nucleic acid (BNA)
  modified_base 19: mod_base = OTHER; note = bicyclic nucleic acid (BNA)
  modified_base 21..22: mod_base = OTHER; note = bicyclic nucleic acid (BNA)
  source 1..22: mol_type = other DNA
  modified_base 11: mod_base = OTHER; note = Uracil
  modified_base 16: mod_base = OTHER; note = Uracil
  modified_base 17: mod_base = OTHER; note = Uracil
  modified_base 18: mod_base = OTHER; note = Uracil
  modified_base 20: mod_base = OTHER; note = Uracil
tcaaggaagatggcatttctag

SEQ ID NO: 15448 - DNA, 22 bp, synthetic construct
  misc_feature 1..22: note = Description of Artificial Sequence: Synthetic Antisense oligonucleotide
  misc_feature 1..22: note = Original Sequence: tcaaggaagauggcauuucuag
  modified_base 1..2: mod_base = OTHER; note = bicyclic nucleic acid (BNA)
  modified_base 12: mod_base = OTHER; note = bicyclic nucleic acid (BNA)
  modified_base 14: mod_base = OTHER; note = bicyclic nucleic acid (BNA)
  modified_base 21..22: mod_base = OTHER; note = bicyclic nucleic acid (BNA)
  source 1..22: mol_type = other DNA
  modified_base 11: mod_base = OTHER; note = Uracil
  modified_base 16: mod_base = OTHER; note = Uracil
  modified_base 17: mod_base = OTHER; note = Uracil
  modified_base 18: mod_base = OTHER; note = Uracil
  modified_base 20: mod_base = OTHER; note = Uracil
tcaaggaagatggcatttctag

SEQ ID NO: 15449 - DNA, 22 bp, synthetic construct
  misc_feature 1..22: note = Description of Artificial Sequence: Synthetic Antisense oligonucleotide
  misc_feature 1..22: note = Original Sequence: tcaaggaagauggcauuucuag
  modified_base 1..2: mod_base = OTHER; note = bicyclic nucleic acid (BNA)
  modified_base 6: mod_base = OTHER; note = bicyclic nucleic acid (BNA)
  modified_base 12: mod_base = OTHER; note = bicyclic nucleic acid (BNA)
  modified_base 21..22: mod_base = OTHER; note = bicyclic nucleic acid (BNA)
  source 1..22: mol_type = other DNA
  modified_base 11: mod_base = OTHER; note = Uracil
  modified_base 16: mod_base = OTHER; note = Uracil
  modified_base 17: mod_base = OTHER; note = Uracil
  modified_base 18: mod_base = OTHER; note = Uracil
  modified_base 20: mod_base = OTHER; note = Uracil
tcaaggaagatggcatttctag

SEQ ID NO: 15450 - DNA, 22 bp, synthetic construct
  misc_feature 1..22: note = Description of Artificial Sequence: Synthetic Antisense oligonucleotide
  misc_feature 1..22: note = Original Sequence: tcaaggaagauggcauuucuag
  modified_base 1..2: mod_base = OTHER; note = bicyclic nucleic acid (BNA)
  modified_base 5..6: mod_base = OTHER; note = bicyclic nucleic acid (BNA)
  modified_base 21..22: mod_base = OTHER; note = bicyclic nucleic acid (BNA)
  source 1..22: mol_type = other DNA
  modified_base 11: mod_base = OTHER; note = Uracil
  modified_base 16: mod_base = OTHER; note = Uracil
  modified_base 17: mod_base = OTHER; note = Uracil
  modified_base 18: mod_base = OTHER; note = Uracil
  modified_base 20: mod_base = OTHER; note = Uracil
tcaaggaagatggcatttctag

SEQ ID NO: 15451 - DNA, 22 bp, synthetic construct
  misc_feature 1..22: note = Description of Artificial Sequence: Synthetic Antisense oligonucleotide
  misc_feature 1..22: note = Original Sequence: tcaaggaagauggcauuucuag
  modified_base 1..2: mod_base = OTHER; note = bicyclic nucleic acid (BNA)
  modified_base 9: mod_base = OTHER; note = bicyclic nucleic acid (BNA)
  modified_base 12: mod_base = OTHER; note = bicyclic nucleic acid (BNA)
  modified_base 21..22: mod_base = OTHER; note = bicyclic nucleic acid (BNA)
  source 1..22: mol_type = other DNA
  modified_base 11: mod_base = OTHER; note = Uracil
  modified_base 16: mod_base = OTHER; note = Uracil
  modified_base 17: mod_base = OTHER; note = Uracil
  modified_base 18: mod_base = OTHER; note = Uracil
  modified_base 20: mod_base = OTHER; note = Uracil
tcaaggaagatggcatttctag

SEQ ID NO: 15452 - DNA, 22 bp, synthetic construct
  misc_feature 1..22: note = Description of Artificial Sequence: Synthetic Antisense oligonucleotide
  misc_feature 1..22: note = Original Sequence: tcaaggaagauggcauuucuag
  modified_base 1..2: mod_base = OTHER; note = bicyclic nucleic acid (BNA)
  modified_base 13: mod_base = OTHER; note = bicyclic nucleic acid (BNA)
  modified_base 19: mod_base = OTHER; note = bicyclic nucleic acid (BNA)
  modified_base 21..22: mod_base = OTHER; note = bicyclic nucleic acid (BNA)
  source 1..22: mol_type = other DNA
  modified_base 11: mod_base = OTHER; note = Uracil
  modified_base 16: mod_base = OTHER; note = Uracil
  modified_base 17: mod_base = OTHER; note = Uracil
  modified_base 18: mod_base = OTHER; note = Uracil
  modified_base 20: mod_base = OTHER; note = Uracil
tcaaggaagatggcatttctag

SEQ ID NO: 15453 - DNA, 22 bp, synthetic construct
  misc_feature 1..22: note = Description of Artificial Sequence: Synthetic Antisense oligonucleotide
  misc_feature 1..22: note = Original Sequence: tcaaggaagauggcauuucuag
  modified_base 1..2: mod_base = OTHER; note = bicyclic nucleic acid (BNA)
  modified_base 12..13: mod_base = OTHER; note = bicyclic nucleic acid (BNA)
  modified_base 21..22: mod_base = OTHER; note = bicyclic nucleic acid (BNA)
  source 1..22: mol_type = other DNA
  modified_base 11: mod_base = OTHER; note = Uracil
  modified_base 16: mod_base = OTHER; note = Uracil
  modified_base 17: mod_base = OTHER; note = Uracil
  modified_base 18: mod_base = OTHER; note = Uracil
  modified_base 20: mod_base = OTHER; note = Uracil
tcaaggaagatggcatttctag

SEQ ID NO: 15454 - DNA, 22 bp, synthetic construct
  misc_feature 1..22: note = Description of Artificial Sequence: Synthetic Antisense oligonucleotide
  misc_feature 1..22: note = Original Sequence: tcaaggaagauggcauuucuag
  modified_base 1..2: mod_base = OTHER; note = bicyclic nucleic acid (BNA)
  modified_base 5: mod_base = OTHER; note = bicyclic nucleic acid (BNA)
  modified_base 12: mod_base = OTHER; note = bicyclic nucleic acid (BNA)
  modified_base 21..22: mod_base = OTHER; note = bicyclic nucleic acid (BNA)
  source 1..22: mol_type = other DNA
  modified_base 11: mod_base = OTHER; note = Uracil
  modified_base 16: mod_base = OTHER; note = Uracil
  modified_base 17: mod_base = OTHER; note = Uracil
  modified_base 18: mod_base = OTHER; note = Uracil
  modified_base 20: mod_base = OTHER; note = Uracil
tcaaggaagatggcatttctag

SEQ ID NO: 15455 - DNA, 22 bp, synthetic construct
  misc_feature 1..22: note = Description of Artificial Sequence: Synthetic Antisense oligonucleotide
  misc_feature 1..22: note = Original Sequence: tcaaggaagauggcauuucuag
  modified_base 1..2: mod_base = OTHER; note = bicyclic nucleic acid (BNA)
  modified_base 9: mod_base = OTHER; note = bicyclic nucleic acid (BNA)
  modified_base 13: mod_base = OTHER; note = bicyclic nucleic acid (BNA)
  modified_base 21..22: mod_base = OTHER; note = bicyclic nucleic acid (BNA)
  source 1..22: mol_type = other DNA
  modified_base 11: mod_base = OTHER; note = Uracil
  modified_base 16: mod_base = OTHER; note = Uracil
  modified_base 17: mod_base = OTHER; note = Uracil
  modified_base 18: mod_base = OTHER; note = Uracil
  modified_base 20: mod_base = OTHER; note = Uracil
tcaaggaagatggcatttctag

SEQ ID NO: 15456 - DNA, 22 bp, synthetic construct
  misc_feature 1..22: note = Description of Artificial Sequence: Synthetic Antisense oligonucleotide
  misc_feature 1..22: note = Original Sequence: tcaaggaagauggcauuucuag
  modified_base 1..2: mod_base = OTHER; note = bicyclic nucleic acid (BNA)
  modified_base 14: mod_base = OTHER; note = bicyclic nucleic acid (BNA)
  modified_base 19: mod_base = OTHER; note = bicyclic nucleic acid (BNA)
  modified_base 21..22: mod_base = OTHER; note = bicyclic nucleic acid (BNA)
  source 1..22: mol_type = other DNA
  modified_base 11: mod_base = OTHER; note = Uracil
  modified_base 16: mod_base = OTHER; note = Uracil
  modified_base 17: mod_base = OTHER; note = Uracil
  modified_base 18: mod_base = OTHER; note = Uracil
  modified_base 20: mod_base = OTHER; note = Uracil
tcaaggaagatggcatttctag

SEQ ID NO: 15457 - DNA, 22 bp, synthetic construct
  misc_feature 1..22: note = Description of Artificial Sequence: Synthetic Antisense oligonucleotide
  misc_feature 1..22: note = Original Sequence: tcaaggaagauggcauuucuag
  modified_base 1..2: mod_base = OTHER; note = bicyclic nucleic acid (BNA)
  modified_base 9: mod_base = OTHER; note = bicyclic nucleic acid (BNA)
  modified_base 19: mod_base = OTHER; note = bicyclic nucleic acid (BNA)
  modified_base 21..22: mod_base = OTHER; note = bicyclic nucleic acid (BNA)
  source 1..22: mol_type = other DNA
  modified_base 11: mod_base = OTHER; note = Uracil
  modified_base 16: mod_base = OTHER; note = Uracil
  modified_base 17: mod_base = OTHER; note = Uracil
  modified_base 18: mod_base = OTHER; note = Uracil
  modified_base 20: mod_base = OTHER; note = Uracil
tcaaggaagatggcatttctag

SEQ ID NO: 15458 - RNA, 18 nt, synthetic construct
  misc_feature 1..18: note = Description of Artificial Sequence: Synthetic Antisense oligonucleotide
  modified_base 1..2: mod_base = OTHER; note = bicyclic nucleic acid (BNA)
  modified_base 9: mod_base = OTHER; note = bicyclic nucleic acid (BNA)
  modified_base 17..18: mod_base = OTHER; note = bicyclic nucleic acid (BNA)
  modified_base 9: mod_base = OTHER; note = 5-methyl
  modified_base 13..14: mod_base = OTHER; note = 5-methyl
  modified_base 18: mod_base = OTHER; note = 5-methyl
  source 1..18: mol_type = other RNA
ggtaagttctgtccaagc

SEQ ID NO: 15459 - RNA, 18 nt, synthetic construct
  misc_feature 1..18: note = Description of Artificial Sequence: Synthetic Antisense oligonucleotide
  modified_base 1..2: mod_base = OTHER; note = bicyclic nucleic acid (BNA)
  modified_base 11: mod_base = OTHER; note = bicyclic nucleic acid (BNA)
  modified_base 17..18: mod_base = OTHER; note = bicyclic nucleic acid (BNA)
  modified_base 9: mod_base = OTHER; note = 5-methyl
  modified_base 13..14: mod_base = OTHER; note = 5-methyl
  modified_base 18: mod_base = OTHER; note = 5-methyl
  source 1..18: mol_type = other RNA
ggtaagttctgtccaagc

SEQ ID NO: 15460 - RNA, 18 nt, synthetic construct
  misc_feature 1..18: note = Description of Artificial Sequence: Synthetic Antisense oligonucleotide
  modified_base 1..2: mod_base = OTHER; note = bicyclic nucleic acid (BNA)
  modified_base 6: mod_base = OTHER; note = bicyclic nucleic acid (BNA)
  modified_base 17..18: mod_base = OTHER; note = bicyclic nucleic acid (BNA)
  modified_base 9: mod_base = OTHER; note = 5-methyl
  modified_base 13..14: mod_base = OTHER; note = 5-methyl
  modified_base 18: mod_base = OTHER; note = 5-methyl
  source 1..18: mol_type = other RNA
ggtaagttctgtccaagc

SEQ ID NO: 15461 - RNA, 18 nt, synthetic construct
  misc_feature 1..18: note = Description of Artificial Sequence: Synthetic Antisense oligonucleotide
  modified_base 1..2: mod_base = OTHER; note = bicyclic nucleic acid (BNA)
  modified_base 13: mod_base = OTHER; note = bicyclic nucleic acid (BNA)
  modified_base 17..18: mod_base = OTHER; note = bicyclic nucleic acid (BNA)
  modified_base 9: mod_base = OTHER; note = 5-methyl
  modified_base 13..14: mod_base = OTHER; note = 5-methyl
  modified_base 18: mod_base = OTHER; note = 5-methyl
  source 1..18: mol_type = other RNA
ggtaagttctgtccaagc

SEQ ID NO: 15462 - RNA, 18 nt, synthetic construct
  misc_feature 1..18: note = Description of Artificial Sequence: Synthetic Antisense oligonucleotide
  modified_base 1..2: mod_base = OTHER; note = bicyclic nucleic acid (BNA)
  modified_base 14: mod_base = OTHER; note = bicyclic nucleic acid (BNA)
  modified_base 17..18: mod_base = OTHER; note = bicyclic nucleic acid (BNA)
  modified_base 9: mod_base = OTHER; note = 5-methyl
  modified_base 13..14: mod_base = OTHER; note = 5-methyl
  modified_base 18: mod_base = OTHER; note = 5-methyl
  source 1..18: mol_type = other RNA
ggtaagttctgtccaagc

SEQ ID NO: 15463 - DNA, 18 bp, synthetic construct
  misc_feature 1..18: note = Description of Artificial Sequence: Synthetic Antisense oligonucleotide
  misc_feature 1..18: note = Original Sequence: gtaaguucuguccaagcc
  modified_base 1..2: mod_base = OTHER; note = bicyclic nucleic acid (BNA)
  modified_base 16..18: mod_base = OTHER; note = bicyclic nucleic acid (BNA)
  modified_base 8: mod_base = OTHER; note = 5-methyl
  modified_base 12..13: mod_base = OTHER; note = 5-methyl
  modified_base 17..18: mod_base = OTHER; note = 5-methyl
  source 1..18: mol_type = other DNA
  modified_base 6: mod_base = OTHER; note = Uracil
  modified_base 7: mod_base = OTHER; note = Uracil
  modified_base 9: mod_base = OTHER; note = Uracil
  modified_base 11: mod_base = OTHER; note = Uracil
gtaagttctgtccaagcc

SEQ ID NO: 15464 - DNA, 18 bp, synthetic construct
  misc_feature 1..18: note = Description of Artificial Sequence: Synthetic Antisense oligonucleotide
  misc_feature 1..18: note = Original Sequence: gtaaguucuguccaagcc
  modified_base 1..2: mod_base = OTHER; note = bicyclic nucleic acid (BNA)
  modified_base 10: mod_base = OTHER; note = bicyclic nucleic acid (BNA)
  modified_base 17..18: mod_base = OTHER; note = bicyclic nucleic acid (BNA)
  modified_base 8: mod_base = OTHER; note = 5-methyl
  modified_base 12..13: mod_base = OTHER; note = 5-methyl
  modified_base 17..18: mod_base = OTHER; note = 5-methyl
  source 1..18: mol_type = other DNA
  modified_base 6: mod_base = OTHER; note = Uracil
  modified_base 7: mod_base = OTHER; note = Uracil
  modified_base 9: mod_base = OTHER; note = Uracil
  modified_base 11: mod_base = OTHER; note = Uracil
gtaagttctgtccaagcc

SEQ ID NO: 15465 - DNA, 18 bp, synthetic construct
  misc_feature 1..18: note = Description of Artificial Sequence: Synthetic Antisense oligonucleotide
  misc_feature 1..18: note = Original Sequence: gtaaguucuguccaagcc
  modified_base 1..2: mod_base = OTHER; note = bicyclic nucleic acid (BNA)
  modified_base 5: mod_base = OTHER; note = bicyclic nucleic acid (BNA)
  modified_base 17..18: mod_base = OTHER; note = bicyclic nucleic acid (BNA)
  modified_base 8: mod_base = OTHER; note = 5-methyl
  modified_base 12..13: mod_base = OTHER; note = 5-methyl
  modified_base 17..18: mod_base = OTHER; note = 5-methyl
  source 1..18: mol_type = other DNA
  modified_base 6: mod_base = OTHER; note = Uracil
  modified_base 7: mod_base = OTHER; note = Uracil
  modified_base 9: mod_base = OTHER; note = Uracil
  modified_base 11: mod_base = OTHER; note = Uracil
gtaagttctgtccaagcc

SEQ ID NO: 15466 - DNA, 18 bp, synthetic construct
  misc_feature 1..18: note = Description of Artificial Sequence: Synthetic Antisense oligonucleotide
  misc_feature 1..18: note = Original Sequence: gtaaguucuguccaagcc
  modified_base 1..2: mod_base = OTHER; note = bicyclic nucleic acid (BNA)
  modified_base 12: mod_base = OTHER; note = bicyclic nucleic acid (BNA)
  modified_base 17..18: mod_base = OTHER; note = bicyclic nucleic acid (BNA)
  modified_base 8: mod_base = OTHER; note = 5-methyl
  modified_base 12..13: mod_base = OTHER; note = 5-methyl
  modified_base 17..18: mod_base = OTHER; note = 5-methyl
  source 1..18: mol_type = other DNA
  modified_base 6: mod_base = OTHER; note = Uracil
  modified_base 7: mod_base = OTHER; note = Uracil
  modified_base 9: mod_base = OTHER; note = Uracil
  modified_base 11: mod_base = OTHER; note = Uracil
gtaagttctgtccaagcc

SEQ ID NO: 15467 - DNA, 18 bp, synthetic construct
  misc_feature 1..18: note = Description of Artificial Sequence: Synthetic Antisense oligonucleotide
  misc_feature 1..18: note = Original Sequence: gtaaguucuguccaagcc
  modified_base 1..2: mod_base = OTHER; note = bicyclic nucleic acid (BNA)
  modified_base 13: mod_base = OTHER; note = bicyclic nucleic acid (BNA)
  modified_base 17..18: mod_base = OTHER; note = bicyclic nucleic acid (BNA)
  modified_base 8: mod_base = OTHER; note = 5-methyl
  modified_base 12..13: mod_base = OTHER; note = 5-methyl
  modified_base 17..18: mod_base = OTHER; note = 5-methyl
  source 1..18: mol_type = other DNA
  modified_base 6: mod_base = OTHER; note = Uracil
  modified_base 7: mod_base = OTHER; note = Uracil
  modified_base 9: mod_base = OTHER; note = Uracil
  modified_base 11: mod_base = OTHER; note = Uracil
gtaagttctgtccaagcc

SEQ ID NO: 15468 - DNA, 18 bp, synthetic construct
  misc_feature 1..18: note = Description of Artificial Sequence: Synthetic Antisense oligonucleotide
  misc_feature 1..18: note = Original Sequence: gtaaguucuguccaagcc
  modified_base 1..2: mod_base = OTHER; note = bicyclic nucleic acid (BNA)
  modified_base 8: mod_base = OTHER; note = bicyclic nucleic acid (BNA)
  modified_base 17..18: mod_base = OTHER; note = bicyclic nucleic acid (BNA)
  modified_base 8: mod_base = OTHER; note = 5-methyl
  modified_base 12..13: mod_base = OTHER; note = 5-methyl
  modified_base 17..18: mod_base = OTHER; note = 5-methyl
  source 1..18: mol_type = other DNA
  modified_base 6: mod_base = OTHER; note = Uracil
  modified_base 7: mod_base = OTHER; note = Uracil
  modified_base 9: mod_base = OTHER; note = Uracil
  modified_base 11: mod_base = OTHER; note = Uracil
gtaagttctgtccaagcc

SEQ ID NO: 15469 - RNA, 18 nt, synthetic construct
  misc_feature 1..18: note = Description of Artificial Sequence: Synthetic Antisense oligonucleotide
  modified_base 1..2: mod_base = OTHER; note = bicyclic nucleic acid (BNA)
  modified_base 4: mod_base = OTHER; note = bicyclic nucleic acid (BNA)
  modified_base 17..18: mod_base = OTHER; note = bicyclic nucleic acid (BNA)
  modified_base 4: mod_base = OTHER; note = 5-methyl
  modified_base 13: mod_base = OTHER; note = 5-methyl
  modified_base 17..18: mod_base = OTHER; note = 5-methyl
  source 1..18: mol_type = other RNA
agtcggtaagttctgtcc

SEQ ID NO: 15470 - RNA, 18 nt, synthetic construct
  misc_feature 1..18: note = Description of Artificial Sequence: Synthetic Antisense oligonucleotide
  modified_base 1..2: mod_base = OTHER; note = bicyclic nucleic acid (BNA)
  modified_base 10: mod_base = OTHER; note = bicyclic nucleic acid (BNA)
  modified_base 17..18: mod_base = OTHER; note = bicyclic nucleic acid (BNA)
  modified_base 4: mod_base = OTHER; note = 5-methyl
  modified_base 13: mod_base = OTHER; note = 5-methyl
  modified_base 17..18: mod_base = OTHER; note = 5-methyl
  source 1..18: mol_type = other RNA
agtcggtaagttctgtcc

SEQ ID NO: 15471 - RNA, 18 nt, synthetic construct
  misc_feature 1..18: note = Description of Artificial Sequence: Synthetic Antisense oligonucleotide
  modified_base 1..2: mod_base = OTHER; note = bicyclic nucleic acid (BNA)
  modified_base 5: mod_base = OTHER; note = bicyclic nucleic acid (BNA)
  modified_base 17..18: mod_base = OTHER; note = bicyclic nucleic acid (BNA)
  modified_base 4: mod_base = OTHER; note = 5-methyl
  modified_base 13: mod_base = OTHER; note = 5-methyl
  modified_base 17..18: mod_base = OTHER; note = 5-methyl
  source 1..18: mol_type = other RNA
agtcggtaagttctgtcc

SEQ ID NO: 15472 - RNA, 18 nt, synthetic construct
  misc_feature 1..18: note = Description of Artificial Sequence: Synthetic Antisense oligonucleotide
  modified_base 1..2: mod_base = OTHER; note = bicyclic nucleic acid (BNA)
  modified_base 6: mod_base = OTHER; note = bicyclic nucleic acid (BNA)
  modified_base 17..18: mod_base = OTHER; note = bicyclic nucleic acid (BNA)
  modified_base 4: mod_base = OTHER; note = 5-methyl
  modified_base 13: mod_base = OTHER; note = 5-methyl
  modified_base 17..18: mod_base = OTHER; note = 5-methyl
  source 1..18: mol_type = other RNA
agtcggtaagttctgtcc

SEQ ID NO: 15473 - RNA, 18 nt, synthetic construct
  misc_feature 1..18: note = Description of Artificial Sequence: Synthetic Antisense oligonucleotide
  modified_base 1..2: mod_base = OTHER; note = bicyclic nucleic acid (BNA)
  modified_base 13: mod_base = OTHER; note = bicyclic nucleic acid (BNA)
  modified_base 17..18: mod_base = OTHER; note = bicyclic nucleic acid (BNA)
  modified_base 4: mod_base = OTHER; note = 5-methyl
  modified_base 13: mod_base = OTHER; note = 5-methyl
  modified_base 17..18: mod_base = OTHER; note = 5-methyl
  source 1..18: mol_type = other RNA
agtcggtaagttctgtcc

SEQ ID NO: 15474 - RNA, 18 nt, synthetic construct
  misc_feature 1..18: note = Description of Artificial Sequence: Synthetic Antisense oligonucleotide
  modified_base 1..2: mod_base = OTHER; note = bicyclic nucleic acid (BNA)
  modified_base 15: mod_base = OTHER; note = bicyclic nucleic acid (BNA)
  modified_base 17..18: mod_base = OTHER; note = bicyclic nucleic acid (BNA)
  modified_base 4: mod_base = OTHER; note = 5-methyl
  modified_base 13: mod_base = OTHER; note = 5-methyl
  modified_base 17..18: mod_base = OTHER; note = 5-methyl
  source 1..18: mol_type = other RNA
agtcggtaagttctgtcc

SEQ ID NO: 15475 - DNA, 18 bp, synthetic construct
  misc_feature 1..18: note = Description of Artificial Sequence: Synthetic Antisense oligonucleotide
  misc_feature 1..18: note = Original Sequence: ctguccaagcccgguuga
  modified_base 1: mod_base = OTHER; note = 5-methyl
  modified_base 5..6: mod_base = OTHER; note = 5-methyl
  modified_base 10..12: mod_base = OTHER; note = 5-methyl
  modified_base 1..3: mod_base = OTHER; note = bicyclic nucleic acid (BNA)
  modified_base 17..18: mod_base = OTHER; note = bicyclic nucleic acid (BNA)
  source 1..18: mol_type = other DNA
  modified_base 4: mod_base = OTHER; note = Uracil
  modified_base 15: mod_base = OTHER; note = Uracil
  modified_base 16: mod_base = OTHER; note = Uracil
ctgtccaagcccggttga

SEQ ID NO: 15476 - DNA, 18 bp, synthetic construct
  misc_feature 1..18: note = Description of Artificial Sequence: Synthetic Antisense oligonucleotide
  misc_feature 1..18: note = Original Sequence: ctguccaagcccgguuga
  modified_base 1: mod_base = OTHER; note = 5-methyl
  modified_base 5..6: mod_base = OTHER; note = 5-methyl
  modified_base 10..12: mod_base = OTHER; note = 5-methyl
  modified_base 1..2: mod_base = OTHER; note = bicyclic nucleic acid (BNA)
  modified_base 9: mod_base = OTHER; note = bicyclic nucleic acid (BNA)
  modified_base 17..18: mod_base = OTHER; note = bicyclic nucleic acid (BNA)
  source 1..18: mol_type = other DNA
  modified_base 4: mod_base = OTHER; note = Uracil
  modified_base 15: mod_base = OTHER; note = Uracil
  modified_base 16: mod_base = OTHER; note = Uracil
ctgtccaagcccggttga

SEQ ID NO: 15477 - DNA, 18 bp, synthetic construct
  misc_feature 1..18: note = Description of Artificial Sequence: Synthetic Antisense oligonucleotide
  misc_feature 1..18: note = Original Sequence: ctguccaagcccgguuga
  modified_base 1: mod_base = OTHER; note = 5-methyl
  modified_base 5..6: mod_base = OTHER; note = 5-methyl
  modified_base 10..12: mod_base = OTHER; note = 5-methyl
  modified_base 1..2: mod_base = OTHER; note = bicyclic nucleic acid (BNA)
  modified_base 10: mod_base = OTHER; note = bicyclic nucleic acid (BNA)
  modified_base 17..18: mod_base = OTHER; note = bicyclic nucleic acid (BNA)
  source 1..18: mol_type = other DNA
  modified_base 4: mod_base = OTHER; note = Uracil
  modified_base 15: mod_base = OTHER; note = Uracil
  modified_base 16: mod_base = OTHER; note = Uracil
ctgtccaagcccggttga

SEQ ID NO: 15478 - DNA, 18 bp, synthetic construct
  misc_feature 1..18: note = Description of Artificial Sequence: Synthetic Antisense oligonucleotide
  misc_feature 1..18: note = Original Sequence: ctguccaagcccgguuga
  modified_base 1: mod_base = OTHER; note = 5-methyl
  modified_base 5..6: mod_base = OTHER; note = 5-methyl
  modified_base 10..12: mod_base = OTHER; note = 5-methyl
  modified_base 1..2: mod_base = OTHER; note = bicyclic nucleic acid (BNA)
  modified_base 5: mod_base = OTHER; note = bicyclic nucleic acid (BNA)
  modified_base 17..18: mod_base = OTHER; note = bicyclic nucleic acid (BNA)
  source 1..18: mol_type = other DNA
  modified_base 4: mod_base = OTHER; note = Uracil
  modified_base 15: mod_base = OTHER; note = Uracil
  modified_base 16: mod_base = OTHER; note = Uracil
ctgtccaagcccggttga

SEQ ID NO: 15479 - DNA, 18 bp, synthetic construct
  misc_feature 1..18: note = Description of Artificial Sequence: Synthetic Antisense oligonucleotide
  misc_feature 1..18: note = Original Sequence: ctguccaagcccgguuga
  modified_base 1: mod_base = OTHER; note = 5-methyl
  modified_base 5..6: mod_base = OTHER; note = 5-methyl
  modified_base 10..12: mod_base = OTHER; note = 5-methyl
  modified_base 1..2: mod_base = OTHER; note = bicyclic nucleic acid (BNA)
  modified_base 11: mod_base = OTHER; note = bicyclic nucleic acid (BNA)
  modified_base 17..18: mod_base = OTHER; note = bicyclic nucleic acid (BNA)
  source 1..18: mol_type = other DNA
  modified_base 4: mod_base = OTHER; note = Uracil
  modified_base 15: mod_base = OTHER; note = Uracil
  modified_base 16: mod_base = OTHER; note = Uracil
ctgtccaagcccggttga

SEQ ID NO: 15480 - DNA, 18 bp, synthetic construct
  misc_feature 1..18: note = Description of Artificial Sequence: Synthetic Antisense oligonucleotide
  misc_feature 1..18: note = Original Sequence: ctguccaagcccgguuga
  modified_base 1: mod_base = OTHER; note = 5-methyl
  modified_base 5..6: mod_base = OTHER; note = 5-methyl
  modified_base 10..12: mod_base = OTHER; note = 5-methyl
  modified_base 1..2: mod_base = OTHER; note = bicyclic nucleic acid (BNA)
  modified_base 6: mod_base = OTHER; note = bicyclic nucleic acid (BNA)
  modified_base 17..18: mod_base = OTHER; note = bicyclic nucleic acid (BNA)
  source 1..18: mol_type = other DNA
  modified_base 4: mod_base = OTHER; note = Uracil
  modified_base 15: mod_base = OTHER; note = Uracil
  modified_base 16: mod_base = OTHER; note = Uracil
ctgtccaagcccggttga

SEQ ID NO: 15481 - DNA, 18 bp, synthetic construct
  misc_feature 1..18: note = Description of Artificial Sequence: Synthetic Antisense oligonucleotide
  misc_feature 1..18: note = Original Sequence: ctguccaagcccgguuga
  modified_base 1: mod_base = OTHER; note = 5-methyl
  modified_base 5..6: mod_base = OTHER; note = 5-methyl
  modified_base 10..12: mod_base = OTHER; note = 5-methyl
  modified_base 1..2: mod_base = OTHER; note = bicyclic nucleic acid (BNA)
  modified_base 12: mod_base = OTHER; note = bicyclic nucleic acid (BNA)
  modified_base 17..18: mod_base = OTHER; note = bicyclic nucleic acid (BNA)
  source 1..18: mol_type = other DNA
  modified_base 4: mod_base = OTHER; note = Uracil
  modified_base 15: mod_base = OTHER; note = Uracil
  modified_base 16: mod_base = OTHER; note = Uracil
ctgtccaagcccggttga

SEQ ID NO: 15482 - DNA, 18 bp, synthetic construct
  misc_feature 1..18: note = Description of Artificial Sequence: Synthetic Antisense oligonucleotide
  misc_feature 1..18: note = Original Sequence: ctguccaagcccgguuga
  modified_base 1: mod_base = OTHER; note = 5-methyl
  modified_base 5..6: mod_base = OTHER; note = 5-methyl
  modified_base 10..12: mod_base = OTHER; note = 5-methyl
  modified_base 1..2: mod_base = OTHER; note = bicyclic nucleic acid (BNA)
  modified_base 13: mod_base = OTHER; note = bicyclic nucleic acid (BNA)
  modified_base 17..18: mod_base = OTHER; note = bicyclic nucleic acid (BNA)
  source 1..18: mol_type = other DNA
  modified_base 4: mod_base = OTHER; note = Uracil
  modified_base 15: mod_base = OTHER; note = Uracil
  modified_base 16: mod_base = OTHER; note = Uracil
ctgtccaagcccggttga

SEQ ID NO: 15483 - DNA, 18 bp, synthetic construct
  misc_feature 1..18: note = Description of Artificial Sequence: Synthetic Antisense oligonucleotide
  misc_feature 1..18: note = Original Sequence: ctguccaagcccgguuga
  modified_base 1: mod_base = OTHER; note = 5-methyl
  modified_base 5..6: mod_base = OTHER; note = 5-methyl
  modified_base 10..12: mod_base = OTHER; note = 5-methyl
  modified_base 1..2: mod_base = OTHER; note = bicyclic nucleic acid (BNA)
  modified_base 14: mod_base = OTHER; note = bicyclic nucleic acid (BNA)
  modified_base 17..18: mod_base = OTHER; note = bicyclic nucleic acid (BNA)
  source 1..18: mol_type = other DNA
  modified_base 4: mod_base = OTHER; note = Uracil
  modified_base 15: mod_base = OTHER; note = Uracil
  modified_base 16: mod_base = OTHER; note = Uracil
ctgtccaagcccggttga

SEQ ID NO: 15484 - RNA, 18 nt, synthetic construct
  misc_feature 1..18: note = Description of Artificial Sequence: Synthetic Antisense oligonucleotide
  modified_base 1..2: mod_base = OTHER; note = bicyclic nucleic acid (BNA)
  modified_base 9: mod_base = OTHER; note = bicyclic nucleic acid (BNA)
  modified_base 14: mod_base = OTHER; note = bicyclic nucleic acid (BNA)
  modified_base 17..18: mod_base = OTHER; note = bicyclic nucleic acid (BNA)
  modified_base 9: mod_base = OTHER; note = 5-methyl
  modified_base 13..14: mod_base = OTHER; note = 5-methyl
  modified_base 18: mod_base = OTHER; note = 5-methyl
  source 1..18: mol_type = other RNA
ggtaagttctgtccaagc

SEQ ID NO: 15485 - RNA, 18 nt, synthetic construct
  misc_feature 1..18: note = Description of Artificial Sequence: Synthetic Antisense oligonucleotide
  modified_base 1..2: mod_base = OTHER; note = bicyclic nucleic acid (BNA)
  modified_base 6: mod_base = OTHER; note = bicyclic nucleic acid (BNA)
  modified_base 14: mod_base = OTHER; note = bicyclic nucleic acid (BNA)
  modified_base 17..18: mod_base = OTHER; note = bicyclic nucleic acid (BNA)
  modified_base 9: mod_base = OTHER; note = 5-methyl
  modified_base 13..14: mod_base = OTHER; note = 5-methyl
  modified_base 18: mod_base = OTHER; note = 5-methyl
  source 1..18: mol_type = other RNA
ggtaagttctgtccaagc

SEQ ID NO: 15486 - RNA, 18 nt, synthetic construct
  misc_feature 1..18: note = Description of Artificial Sequence: Synthetic Antisense oligonucleotide
  modified_base 1..2: mod_base = OTHER; note = bicyclic nucleic acid (BNA)
  modified_base 6: mod_base = OTHER; note = bicyclic nucleic acid (BNA)
  modified_base 9: mod_base = OTHER; note = bicyclic nucleic acid (BNA)
  modified_base 17..18: mod_base = OTHER; note = bicyclic nucleic acid (BNA)
  modified_base 9: mod_base = OTHER; note = 5-methyl
  modified_base 13..14: mod_base = OTHER; note = 5-methyl
  modified_base 18: mod_base = OTHER; note = 5-methyl
  source 1..18: mol_type = other RNA
ggtaagttctgtccaagc

SEQ ID NO: 15487 - RNA, 18 nt, synthetic construct
  misc_feature 1..18: note = Description of Artificial Sequence: Synthetic Antisense oligonucleotide
  modified_base 1..2: mod_base = OTHER; note = bicyclic nucleic acid (BNA)
  modified_base 13..14: mod_base = OTHER; note = bicyclic nucleic acid (BNA)
  modified_base 17..18: mod_base = OTHER; note = bicyclic nucleic acid (BNA)
  modified_base 9: mod_base = OTHER; note = 5-methyl
  modified_base 13..14: mod_base = OTHER; note = 5-methyl
  modified_base 18: mod_base = OTHER; note = 5-methyl
  source 1..18: mol_type = other RNA
ggtaagttctgtccaagc

SEQ ID NO: 15488 - RNA, 18 nt, synthetic construct
  misc_feature 1..18: note = Description of Artificial Sequence: Synthetic Antisense oligonucleotide
  modified_base 1..2: mod_base = OTHER; note = bicyclic nucleic acid (BNA)
  modified_base 6: mod_base = OTHER; note = bicyclic nucleic acid (BNA)
  modified_base 13: mod_base = OTHER; note = bicyclic nucleic acid (BNA)
  modified_base 17..18: mod_base = OTHER; note = bicyclic nucleic acid (BNA)
  modified_base 9: mod_base = OTHER; note = 5-methyl
  modified_base 13..14: mod_base = OTHER; note = 5-methyl
  modified_base 18: mod_base = OTHER; note = 5-methyl
  source 1..18: mol_type = other RNA
ggtaagttctgtccaagc

SEQ ID NO: 15489 - RNA, 18 nt, synthetic construct
  misc_feature 1..18: note = Description of Artificial Sequence: Synthetic Antisense oligonucleotide
  modified_base 1..2: mod_base = OTHER; note = bicyclic nucleic acid (BNA)
  modified_base 9: mod_base = OTHER; note = bicyclic nucleic acid (BNA)
  modified_base 11: mod_base = OTHER; note = bicyclic nucleic acid (BNA)
  modified_base 17..18: mod_base = OTHER; note = bicyclic nucleic acid (BNA)
  modified_base 9: mod_base = OTHER; note = 5-methyl
  modified_base 13..14: mod_base = OTHER; note = 5-methyl
  modified_base 18: mod_base = OTHER; note = 5-methyl
  source 1..18: mol_type = other RNA
ggtaagttctgtccaagc

SEQ ID NO: 15490 - RNA, 18 nt, synthetic construct
  misc_feature 1..18: note = Description of Artificial Sequence: Synthetic Antisense oligonucleotide
  modified_base 1..2: mod_base = OTHER; note = bicyclic nucleic acid (BNA)
  modified_base 11: mod_base = OTHER; note = bicyclic nucleic acid (BNA)
  modified_base 13: mod_base = OTHER; note = bicyclic nucleic acid (BNA)
  modified_base 17..18: mod_base = OTHER; note = bicyclic nucleic acid (BNA)
  modified_base 9: mod_base = OTHER; note = 5-methyl
  modified_base 13..14: mod_base = OTHER; note = 5-methyl
  modified_base 18: mod_base = OTHER; note = 5-methyl
  source 1..18: mol_type = other RNA
ggtaagttctgtccaagc

SEQ ID NO: 15491 - RNA, 18 nt, synthetic construct
  misc_feature 1..18: note = Description of Artificial Sequence: Synthetic Antisense oligonucleotide
  modified_base 1..2: mod_base = OTHER; note = bicyclic nucleic acid (BNA)
  modified_base 11: mod_base = OTHER; note = bicyclic nucleic acid (BNA)
  modified_base 14: mod_base = OTHER; note = bicyclic nucleic acid (BNA)
  modified_base 17..18: mod_base = OTHER; note = bicyclic nucleic acid (BNA)
  modified_base 9: mod_base = OTHER; note = 5-methyl
  modified_base 13..14: mod_base = OTHER; note = 5-methyl
  modified_base 18: mod_base = OTHER; note = 5-methyl
  source 1..18: mol_type = other RNA
ggtaagttctgtccaagc

SEQ ID NO: 15492 - RNA, 18 nt, synthetic construct
  misc_feature 1..18: note = Description of Artificial Sequence: Synthetic Antisense oligonucleotide
  modified_base 1..2: mod_base = OTHER; note = bicyclic nucleic acid (BNA)
  modified_base 6: mod_base = OTHER; note = bicyclic nucleic acid (BNA)
  modified_base 11: mod_base = OTHER; note = bicyclic nucleic acid (BNA)
  modified_base 17..18: mod_base = OTHER; note = bicyclic nucleic acid (BNA)
  modified_base 9: mod_base = OTHER; note = 5-methyl
  modified_base 13..14: mod_base = OTHER; note = 5-methyl
  modified_base 18: mod_base = OTHER; note = 5-methyl
  source 1..18: mol_type = other RNA
ggtaagttctgtccaagc

SEQ ID NO: 15493 - RNA, 18 nt, synthetic construct
  misc_feature 1..18: note = Description of Artificial Sequence: Synthetic Antisense oligonucleotide
  modified_base 1..2: mod_base = OTHER; note = bicyclic nucleic acid (BNA)
  modified_base 9: mod_base = OTHER; note = bicyclic nucleic acid (BNA)
  modified_base 13: mod_base = OTHER; note = bicyclic nucleic acid (BNA)
  modified_base 17..18: mod_base = OTHER; note = bicyclic nucleic acid (BNA)
  modified_base 9: mod_base = OTHER; note = 5-methyl
  modified_base 13..14: mod_base = OTHER; note = 5-methyl
  modified_base 18: mod_base = OTHER; note = 5-methyl
  source 1..18: mol_type = other RNA
ggtaagttctgtccaagc

SEQ ID NO: 15494 - DNA, 18 bp, synthetic construct
  misc_feature 1..18: note = Description of Artificial Sequence: Synthetic Antisense oligonucleotide
  misc_feature 1..18: note = Original Sequence: gtaaguucuguccaagcc
  modified_base 1..2: mod_base = OTHER; note = bicyclic nucleic acid (BNA)
  modified_base 5: mod_base = OTHER; note = bicyclic nucleic acid (BNA)
  modified_base 8: mod_base = OTHER; note = bicyclic nucleic acid (BNA)
  modified_base 17..18: mod_base = OTHER; note = bicyclic nucleic acid (BNA)
  modified_base 8: mod_base = OTHER; note = 5-methyl
  modified_base 12..13: mod_base = OTHER; note = 5-methyl
  modified_base 17..18: mod_base = OTHER; note = 5-methyl
  source 1..18: mol_type = other DNA
  modified_base 6: mod_base = OTHER; note = Uracil
  modified_base 7: mod_base = OTHER; note = Uracil
  modified_base 9: mod_base = OTHER; note = Uracil
  modified_base 11: mod_base = OTHER; note = Uracil
gtaagttctgtccaagcc

SEQ ID NO: 15495 - DNA, 18 bp, synthetic construct
  misc_feature 1..18: note = Description of Artificial Sequence: Synthetic Antisense oligonucleotide
  misc_feature 1..18: note = Original Sequence: gtaaguucuguccaagcc
  modified_base 1..2: mod_base = OTHER; note = bicyclic nucleic acid (BNA)
  modified_base 8: mod_base = OTHER; note = bicyclic nucleic acid (BNA)
  modified_base 13: mod_base = OTHER; note = bicyclic nucleic acid (BNA)
  modified_base 17..18: mod_base = OTHER; note = bicyclic nucleic acid (BNA)
  modified_base 8: mod_base = OTHER; note = 5-methyl
  modified_base 12..13: mod_base = OTHER; note = 5-methyl
  modified_base 17..18: mod_base = OTHER; note = 5-methyl
  source 1..18: mol_type = other DNA
  modified_base 6: mod_base = OTHER; note = Uracil
  modified_base 7: mod_base = OTHER; note = Uracil
  modified_base 9: mod_base = OTHER; note = Uracil
  modified_base 11: mod_base = OTHER; note = Uracil
gtaagttctgtccaagcc

SEQ ID NO: 15496 - DNA, 18 bp, synthetic construct
  misc_feature 1..18: note = Description of Artificial Sequence: Synthetic Antisense oligonucleotide
  misc_feature 1..18: note = Original Sequence: gtaaguucuguccaagcc
  modified_base 1..2: mod_base = OTHER; note = bicyclic nucleic acid (BNA)
  modified_base 5: mod_base = OTHER; note = bicyclic nucleic acid (BNA)
  modified_base 13: mod_base = OTHER; note = bicyclic nucleic acid (BNA)
  modified_base 17..18: mod_base = OTHER; note = bicyclic nucleic acid (BNA)
  modified_base 8: mod_base = OTHER; note = 5-methyl
  modified_base 12..13: mod_base = OTHER; note = 5-methyl
  modified_base 17..18: mod_base = OTHER; note = 5-methyl
  source 1..18: mol_type = other DNA
  modified_base 6: mod_base = OTHER; note = Uracil
  modified_base 7: mod_base = OTHER; note = Uracil
  modified_base 9: mod_base = OTHER; note = Uracil
  modified_base 11: mod_base = OTHER; note = Uracil
gtaagttctgtccaagcc

SEQ ID NO: 15497 - DNA, 18 bp, synthetic construct
  misc_feature 1..18: note = Description of Artificial Sequence: Synthetic Antisense oligonucleotide
  misc_feature 1..18: note = Original Sequence: gtaaguucuguccaagcc
  modified_base 1..2: mod_base = OTHER; note = bicyclic nucleic acid (BNA)
  modified_base 8: mod_base = OTHER; note = bicyclic nucleic acid (BNA)
  modified_base 12: mod_base = OTHER; note = bicyclic nucleic acid (BNA)
  modified_base 17..18: mod_base = OTHER; note = bicyclic nucleic acid (BNA)
  modified_base 8: mod_base = OTHER; note = 5-methyl
  modified_base 12..13: mod_base = OTHER; note = 5-methyl
  modified_base 17..18: mod_base = OTHER; note = 5-methyl
  source 1..18: mol_type = other DNA
  modified_base 6: mod_base = OTHER; note = Uracil
  modified_base 7: mod_base = OTHER; note = Uracil
  modified_base 9: mod_base = OTHER; note = Uracil
  modified_base 11: mod_base = OTHER; note = Uracil
gtaagttctgtccaagcc

SEQ ID NO: 15498 - DNA, 18 bp, synthetic construct
  misc_feature 1..18: note = Description of Artificial Sequence: Synthetic Antisense oligonucleotide
  misc_feature 1..18: note = Original Sequence: gtaaguucuguccaagcc
  modified_base 1..2: mod_base = OTHER; note = bicyclic nucleic acid (BNA)
  modified_base 5: mod_base = OTHER; note = bicyclic nucleic acid (BNA)
  modified_base 10: mod_base = OTHER; note = bicyclic nucleic acid (BNA)
  modified_base 17..18: mod_base = OTHER; note = bicyclic nucleic acid (BNA)
  modified_base 8: mod_base = OTHER; note = 5-methyl
  modified_base 12..13: mod_base = OTHER; note = 5-methyl
  modified_base 17..18: mod_base = OTHER; note = 5-methyl
  source 1..18: mol_type = other DNA
  modified_base 6: mod_base = OTHER; note = Uracil
  modified_base 7: mod_base = OTHER; note = Uracil
  modified_base 9: mod_base = OTHER; note = Uracil
  modified_base 11: mod_base = OTHER; note = Uracil
gtaagttctgtccaagcc

SEQ ID NO: 15499 - DNA, 18 bp, synthetic construct
  misc_feature 1..18: note = Description of Artificial Sequence: Synthetic Antisense oligonucleotide
  misc_feature 1..18: note = Original Sequence: gtaaguucuguccaagcc
  modified_base 1..2: mod_base = OTHER; note = bicyclic nucleic acid (BNA)
  modified_base 8: mod_base = OTHER; note = bicyclic nucleic acid (BNA)
  modified_base 16..18: mod_base = OTHER; note = bicyclic nucleic acid (BNA)
  modified_base 8: mod_base = OTHER; note = 5-methyl
  modified_base 12..13: mod_base = OTHER; note = 5-methyl
  modified_base 17..18: mod_base = OTHER; note = 5-methyl
  source 1..18: mol_type = other DNA
  modified_base 6: mod_base = OTHER; note = Uracil
  modified_base 7: mod_base = OTHER; note = Uracil
  modified_base 9: mod_base = OTHER; note = Uracil
  modified_base 11: mod_base = OTHER; note = Uracil
gtaagttctgtccaagcc

SEQ ID NO: 15500 - DNA, 18 bp, synthetic construct
  misc_feature 1..18: note = Description of Artificial Sequence: Synthetic Antisense oligonucleotide
  misc_feature 1..18: note = Original Sequence: gtaaguucuguccaagcc
  modified_base 1..2: mod_base = OTHER; note = bicyclic nucleic acid (BNA)
  modified_base 10: mod_base = OTHER; note = bicyclic nucleic acid (BNA)
  modified_base 16..18: mod_base = OTHER; note = bicyclic nucleic acid (BNA)
  modified_base 8: mod_base = OTHER; note = 5-methyl
  modified_base 12..13: mod_base = OTHER; note = 5-methyl
  modified_base 17..18: mod_base = OTHER; note = 5-methyl
  source 1..18: mol_type = other DNA
  modified_base 6: mod_base = OTHER; note = Uracil
  modified_base 7: mod_base = OTHER; note = Uracil
  modified_base 9: mod_base = OTHER; note = Uracil
  modified_base 11: mod_base = OTHER; note = Uracil
gtaagttctgtccaagcc

SEQ ID NO: 15501 - DNA, 18 bp, synthetic construct
  misc_feature 1..18: note = Description of Artificial Sequence: Synthetic Antisense oligonucleotide
  misc_feature 1..18: note = Original Sequence: gtaaguucuguccaagcc
  modified_base 1..2: mod_base = OTHER; note = bicyclic nucleic acid (BNA)
  modified_base 10: mod_base = OTHER; note = bicyclic nucleic acid (BNA)
  modified_base 12: mod_base = OTHER; note = bicyclic nucleic acid (BNA)
  modified_base 17..18: mod_base = OTHER; note = bicyclic nucleic acid (BNA)
  modified_base 8: mod_base = OTHER; note = 5-methyl
  modified_base 12..13: mod_base = OTHER; note = 5-methyl
  modified_base 17..18: mod_base = OTHER; note = 5-methyl
  source 1..18: mol_type = other DNA
  modified_base 6: mod_base = OTHER; note = Uracil
  modified_base 7: mod_base = OTHER; note = Uracil
  modified_base 9: mod_base = OTHER; note = Uracil
  modified_base 11: mod_base = OTHER; note = Uracil
gtaagttctgtccaagcc

SEQ ID NO: 15502 - DNA, 18 bp, synthetic construct
  misc_feature 1..18: note = Description of Artificial Sequence: Synthetic Antisense oligonucleotide
  misc_feature 1..18: note = Original Sequence: gtaaguucuguccaagcc
  modified_base 1..2: mod_base = OTHER; note = bicyclic nucleic acid (BNA)
  modified_base 12..13: mod_base = OTHER; note = bicyclic nucleic acid (BNA)
  modified_base 17..18: mod_base = OTHER; note = bicyclic nucleic acid (BNA)
  modified_base 8: mod_base = OTHER; note = 5-methyl
  modified_base 12..13: mod_base = OTHER; note = 5-methyl
  modified_base 17..18: mod_base = OTHER; note = 5-methyl
  source 1..18: mol_type = other DNA
  modified_base 6: mod_base = OTHER; note = Uracil
  modified_base 7: mod_base = OTHER; note = Uracil
  modified_base 9: mod_base = OTHER; note = Uracil
  modified_base 11: mod_base = OTHER; note = Uracil
gtaagttctgtccaagcc

SEQ ID NO: 15503 - DNA, 18 bp, synthetic construct
  misc_feature 1..18: note = Description of Artificial Sequence: Synthetic Antisense oligonucleotide
  misc_feature 1..18: note = Original Sequence: gtaaguucuguccaagcc
  modified_base 1..2: mod_base = OTHER; note = bicyclic nucleic acid (BNA)
  modified_base 5: mod_base = OTHER; note = bicyclic nucleic acid (BNA)
  modified_base 12: mod_base = OTHER; note = bicyclic nucleic acid (BNA)
  modified_base 17..18: mod_base = OTHER; note = bicyclic nucleic acid (BNA)
  modified_base 8: mod_base = OTHER; note = 5-methyl
  modified_base 12..13: mod_base = OTHER; note = 5-methyl
  modified_base 17..18: mod_base = OTHER; note = 5-methyl
  source 1..18: mol_type = other DNA
  modified_base 6: mod_base = OTHER; note = Uracil
  modified_base 7: mod_base = OTHER; note = Uracil
  modified_base 9: mod_base = OTHER; note = Uracil
  modified_base 11: mod_base = OTHER; note = Uracil
gtaagttctgtccaagcc

SEQ ID NO: 15504 - DNA, 18 bp, synthetic construct
  misc_feature 1..18: note = Description of Artificial Sequence: Synthetic Antisense oligonucleotide
  misc_feature 1..18: note = Original Sequence: gtaaguucuguccaagcc
  modified_base 1..2: mod_base = OTHER; note = bicyclic nucleic acid (BNA)
  modified_base 8: mod_base = OTHER; note = bicyclic nucleic acid (BNA)
  modified_base 10: mod_base = OTHER; note = bicyclic nucleic acid (BNA)
  modified_base 17..18: mod_base = OTHER; note = bicyclic nucleic acid (BNA)
  modified_base 8: mod_base = OTHER; note = 5-methyl
  modified_base 12..13: mod_base = OTHER; note = 5-methyl
  modified_base 17..18: mod_base = OTHER; note = 5-methyl
  source 1..18: mol_type = other DNA
  modified_base 6: mod_base = OTHER; note = Uracil
  modified_base 7: mod_base = OTHER; note = Uracil
  modified_base 9: mod_base = OTHER; note = Uracil
  modified_base 11: mod_base = OTHER; note = Uracil
gtaagttctgtccaagcc

SEQ ID NO: 15505 - DNA, 18 bp, synthetic construct
  misc_feature 1..18: note = Description of Artificial Sequence: Synthetic Antisense oligonucleotide
  misc_feature 1..18: note = Original Sequence: gtaaguucuguccaagcc
  modified_base 1..2: mod_base = OTHER; note = bicyclic nucleic acid (BNA)
  modified_base 13: mod_base = OTHER; note = bicyclic nucleic acid (BNA)
  modified_base 16..18: mod_base = OTHER; note = bicyclic nucleic acid (BNA)
  modified_base 8: mod_base = OTHER; note = 5-methyl
  modified_base 12..13: mod_base = OTHER; note = 5-methyl
  modified_base 17..18: mod_base = OTHER; note = 5-methyl
  source 1..18: mol_type = other DNA
  modified_base 6: mod_base = OTHER; note = Uracil
  modified_base 7: mod_base = OTHER; note = Uracil
  modified_base 9: mod_base = OTHER; note = Uracil
  modified_base 11: mod_base = OTHER; note = Uracil
gtaagttctgtccaagcc

SEQ ID NO: 15506 - DNA, 18 bp, synthetic construct
  misc_feature 1..18: note = Description of Artificial Sequence: Synthetic Antisense oligonucleotide
  misc_feature 1..18: note = Original Sequence: gtaaguucuguccaagcc
  modified_base 1..2: mod_base = OTHER; note = bicyclic nucleic acid (BNA)
  modified_base 5: mod_base = OTHER; note = bicyclic nucleic acid (BNA)
  modified_base 16..18: mod_base = OTHER; note = bicyclic nucleic acid (BNA)
  modified_base 8: mod_base = OTHER; note = 5-methyl
  modified_base 12..13: mod_base = OTHER; note = 5-methyl
  modified_base 17..18: mod_base = OTHER; note = 5-methyl
  source 1..18: mol_type = other DNA
  modified_base 6: mod_base = OTHER; note = Uracil
  modified_base 7: mod_base = OTHER; note = Uracil
  modified_base 9: mod_base = OTHER; note = Uracil
  modified_base 11: mod_base = OTHER; note = Uracil
gtaagttctgtccaagcc

SEQ ID NO: 15507 - DNA, 18 bp, synthetic construct
  misc_feature 1..18: note = Description of Artificial Sequence: Synthetic Antisense oligonucleotide
  misc_feature 1..18: note = Original Sequence: gtaaguucuguccaagcc
  modified_base 1..2: mod_base = OTHER; note = bicyclic nucleic acid (BNA)
  modified_base 12: mod_base = OTHER; note = bicyclic nucleic acid (BNA)
  modified_base 16..18: mod_base = OTHER; note = bicyclic nucleic acid (BNA)
  modified_base 8: mod_base = OTHER; note = 5-methyl
  modified_base 12..13: mod_base = OTHER; note = 5-methyl
  modified_base 17..18: mod_base = OTHER; note = 5-methyl
  source 1..18: mol_type = other DNA
  modified_base 6: mod_base = OTHER; note = Uracil
  modified_base 7: mod_base = OTHER; note = Uracil
  modified_base 9: mod_base = OTHER; note = Uracil
  modified_base 11: mod_base = OTHER; note = Uracil
gtaagttctgtccaagcc

SEQ ID NO: 15508 - DNA, 18 bp, synthetic construct
  misc_feature 1..18: note = Description of Artificial Sequence: Synthetic Antisense oligonucleotide
  misc_feature 1..18: note = Original Sequence: gtaaguucuguccaagcc
  modified_base 1..2: mod_base = OTHER; note = bicyclic nucleic acid (BNA)
  modified_base 10: mod_base = OTHER; note = bicyclic nucleic acid (BNA)
  modified_base 13: mod_base = OTHER; note = bicyclic nucleic acid (BNA)
  modified_base 17..18: mod_base = OTHER; note = bicyclic nucleic acid (BNA)
  modified_base 8: mod_base = OTHER; note = 5-methyl
  modified_base 12..13: mod_base = OTHER; note = 5-methyl
  modified_base 17..18: mod_base = OTHER; note = 5-methyl
  source 1..18: mol_type = other DNA
  modified_base 6: mod_base = OTHER; note = Uracil
  modified_base 7: mod_base = OTHER; note = Uracil
  modified_base 9: mod_base = OTHER; note = Uracil
  modified_base 11: mod_base = OTHER; note = Uracil
gtaagttctgtccaagcc

SEQ ID NO: 15509 - RNA, 18 nt, synthetic construct
  misc_feature 1..18: note = Description of Artificial Sequence: Synthetic Antisense oligonucleotide
  modified_base 1..2: mod_base = OTHER; note = bicyclic nucleic acid (BNA)
  modified_base 6: mod_base = OTHER; note = bicyclic nucleic acid (BNA)
  modified_base 10: mod_base = OTHER; note = bicyclic nucleic acid (BNA)
  modified_base 17..18: mod_base = OTHER; note = bicyclic nucleic acid (BNA)
  modified_base 4: mod_base = OTHER; note = 5-methyl
  modified_base 13: mod_base = OTHER; note = 5-methyl
  modified_base 17..18: mod_base = OTHER; note = 5-methyl
  source 1..18: mol_type = other RNA
agtcggtaagttctgtcc

SEQ ID NO: 15510 - RNA, 18 nt, synthetic construct
  misc_feature 1..18: note = Description of Artificial Sequence: Synthetic Antisense oligonucleotide
  modified_base 1..2: mod_base = OTHER; note = bicyclic nucleic acid (BNA)
  modified_base 5: mod_base = OTHER; note = bicyclic nucleic acid (BNA)
  modified_base 13: mod_base = OTHER; note = bicyclic nucleic acid (BNA)
  modified_base 17..18: mod_base = OTHER; note = bicyclic nucleic acid (BNA)
  modified_base 4: mod_base = OTHER; note = 5-methyl
  modified_base 13: mod_base = OTHER; note = 5-methyl
  modified_base 17..18: mod_base = OTHER; note = 5-methyl
  source 1..18: mol_type = other RNA
agtcggtaagttctgtcc

SEQ ID NO: 15511 - RNA, 18 nt, synthetic construct
  misc_feature 1..18: note = Description of Artificial Sequence: Synthetic Antisense oligonucleotide
  modified_base 1..2: mod_base = OTHER; note = bicyclic nucleic acid (BNA)
  modified_base 4: mod_base = OTHER; note = bicyclic nucleic acid (BNA)
  modified_base 15: mod_base = OTHER; note = bicyclic nucleic acid (BNA)
  modified_base 17..18: mod_base = OTHER; note = bicyclic nucleic acid (BNA)
  modified_base 4: mod_base = OTHER; note = 5-methyl
  modified_base 13: mod_base = OTHER; note = 5-methyl
  modified_base 17..18: mod_base = OTHER; note = 5-methyl
  source 1..18: mol_type = other RNA
agtcggtaagttctgtcc

SEQ ID NO: 15512 - RNA, 18 nt, synthetic construct
  misc_feature 1..18: note = Description of Artificial Sequence: Synthetic Antisense oligonucleotide
  modified_base 1..2: mod_base = OTHER; note = bicyclic nucleic acid (BNA)
  modified_base 5: mod_base = OTHER; note = bicyclic nucleic acid (BNA)
  modified_base 10: mod_base = OTHER; note = bicyclic nucleic acid (BNA)
  modified_base 17..18: mod_base = OTHER; note = bicyclic nucleic acid (BNA)
  modified_base 4: mod_base = OTHER; note = 5-methyl
  modified_base 13: mod_base = OTHER; note = 5-methyl
  modified_base 17..18: mod_base = OTHER; note = 5-methyl
  source 1..18: mol_type = other RNA
agtcggtaagttctgtcc

SEQ ID NO: 15513 - RNA, 18 nt, synthetic construct
  misc_feature 1..18: note = Description of Artificial Sequence: Synthetic Antisense oligonucleotide
  modified_base 1..2: mod_base = OTHER; note = bicyclic nucleic acid (BNA)
  modified_base 6: mod_base = OTHER; note = bicyclic nucleic acid (BNA)
  modified_base 13: mod_base = OTHER; note = bicyclic nucleic acid (BNA)
  modified_base 17..18: mod_base = OTHER; note = bicyclic nucleic acid (BNA)
  modified_base 4: mod_base = OTHER; note = 5-methyl
  modified_base 13: mod_base = OTHER; note = 5-methyl
  modified_base 17..18: mod_base = OTHER; note = 5-methyl
  source 1..18: mol_type = other RNA
agtcggtaagttctgtcc

SEQ ID NO: 15514 - RNA, 18 nt, synthetic construct
  misc_feature 1..18: note = Description of Artificial Sequence: Synthetic Antisense oligonucleotide
  modified_base 1..2: mod_base = OTHER; note = bicyclic nucleic acid (BNA)
  modified_base 10: mod_base = OTHER; note = bicyclic nucleic acid (BNA)
  modified_base 15: mod_base = OTHER; note = bicyclic nucleic acid (BNA)
  modified_base 17..18: mod_base = OTHER; note = bicyclic nucleic acid (BNA)
  modified_base 4: mod_base = OTHER; note = 5-methyl
  modified_base 13: mod_base = OTHER; note = 5-methyl
  modified_base 17..18: mod_base = OTHER; note = 5-methyl
  source 1..18: mol_type = other RNA
agtcggtaagttctgtcc

SEQ ID NO: 15515 - RNA, 18 nt, synthetic construct
  misc_feature 1..18: note = Description of Artificial Sequence: Synthetic Antisense oligonucleotide
  modified_base 1..2: mod_base = OTHER; note = bicyclic nucleic acid (BNA)
  modified_base 13: mod_base = OTHER; note = bicyclic nucleic acid (BNA)
  modified_base 15: mod_base = OTHER; note = bicyclic nucleic acid (BNA)
  modified_base 17..18: mod_base = OTHER; note = bicyclic nucleic acid (BNA)
  modified_base 4: mod_base = OTHER; note = 5-methyl
  modified_base 13: mod_base = OTHER; note = 5-methyl
  modified_base 17..18: mod_base = OTHER; note = 5-methyl
  source 1..18: mol_type = other RNA
agtcggtaagttctgtcc

SEQ ID NO: 15516 - RNA, 18 nt, synthetic construct
  misc_feature 1..18: note = Description of Artificial Sequence: Synthetic Antisense oligonucleotide
  modified_base 1..2: mod_base = OTHER; note = bicyclic nucleic acid (BNA)
  modified_base 5..6: mod_base = OTHER; note = bicyclic nucleic acid (BNA)
  modified_base 17..18: mod_base = OTHER; note = bicyclic nucleic acid (BNA)
  modified_base 4: mod_base = OTHER; note = 5-methyl
  modified_base 13: mod_base = OTHER; note = 5-methyl
  modified_base 17..18: mod_base = OTHER; note = 5-methyl
  source 1..18: mol_type = other RNA
agtcggtaagttctgtcc

SEQ ID NO: 15517 - RNA, 18 nt, synthetic construct
  misc_feature 1..18: note = Description of Artificial Sequence: Synthetic Antisense oligonucleotide
  modified_base 1..2: mod_base = OTHER; note = bicyclic nucleic acid (BNA)
  modified_base 5: mod_base = OTHER; note = bicyclic nucleic acid (BNA)
  modified_base 15: mod_base = OTHER; note = bicyclic nucleic acid (BNA)
  modified_base 17..18: mod_base = OTHER; note = bicyclic nucleic acid (BNA)
  modified_base 4: mod_base = OTHER; note = 5-methyl
  modified_base 13: mod_base = OTHER; note = 5-methyl
  modified_base 17..18: mod_base = OTHER; note = 5-methyl
  source 1..18: mol_type = other RNA
agtcggtaagttctgtcc

SEQ ID NO: 15518 - RNA, 18 nt, synthetic construct
  misc_feature 1..18: note = Description of Artificial Sequence: Synthetic Antisense oligonucleotide
  modified_base 1..2: mod_base = OTHER; note = bicyclic nucleic acid (BNA)
  modified_base 4: mod_base = OTHER; note = bicyclic nucleic acid (BNA)
  modified_base 10: mod_base = OTHER; note = bicyclic nucleic acid (BNA)
  modified_base 17..18: mod_base = OTHER; note = bicyclic nucleic acid (BNA)
  modified_base 4: mod_base = OTHER; note = 5-methyl
  modified_base 13: mod_base = OTHER; note = 5-methyl
  modified_base 17..18: mod_base = OTHER; note = 5-methyl
  source 1..18: mol_type = other RNA
agtcggtaagttctgtcc

SEQ ID NO: 15519 - RNA, 18 nt, synthetic construct
  misc_feature 1..18: note = Description of Artificial Sequence: Synthetic Antisense oligonucleotide
  modified_base 1..2: mod_base = OTHER; note = bicyclic nucleic acid (BNA)
  modified_base 4: mod_base = OTHER; note = bicyclic nucleic acid (BNA)
  modified_base 6: mod_base = OTHER; note = bicyclic nucleic acid (BNA)
  modified_base 17..18: mod_base = OTHER; note = bicyclic nucleic acid (BNA)
  modified_base 4: mod_base = OTHER; note = 5-methyl
  modified_base 13: mod_base = OTHER; note = 5-methyl
  modified_base 17..18: mod_base = OTHER; note = 5-methyl
  source 1..18: mol_type = other RNA
agtcggtaagttctgtcc

SEQ ID NO: 15520 - RNA, 18 nt, synthetic construct
  misc_feature 1..18: note = Description of Artificial Sequence: Synthetic Antisense oligonucleotide
  modified_base 1..2: mod_base = OTHER; note = bicyclic nucleic acid (BNA)
  modified_base 4: mod_base = OTHER; note = bicyclic nucleic acid (BNA)
  modified_base 13: mod_base = OTHER; note = bicyclic nucleic acid (BNA)
  modified_base 17..18: mod_base = OTHER; note = bicyclic nucleic acid (BNA)
  modified_base 4: mod_base = OTHER; note = 5-methyl
  modified_base 13: mod_base = OTHER; note = 5-methyl
  modified_base 17..18: mod_base = OTHER; note = 5-methyl
  source 1..18: mol_type = other RNA
agtcggtaagttctgtcc

SEQ ID NO: 15521 - RNA, 18 nt, synthetic construct
  misc_feature 1..18: note = Description of Artificial Sequence: Synthetic Antisense oligonucleotide
  modified_base 1..2: mod_base = OTHER; note = bicyclic nucleic acid (BNA)
  modified_base 6: mod_base = OTHER; note = bicyclic nucleic acid (BNA)
  modified_base 15: mod_base = OTHER; note = bicyclic nucleic acid (BNA)
  modified_base 17..18: mod_base = OTHER; note = bicyclic nucleic acid (BNA)
  modified_base 4: mod_base = OTHER; note = 5-methyl
  modified_base 13: mod_base = OTHER; note = 5-methyl
  modified_base 17..18: mod_base = OTHER; note = 5-methyl
  source 1..18: mol_type = other RNA
agtcggtaagttctgtcc

SEQ ID NO: 15522 - RNA, 18 nt, synthetic construct
  misc_feature 1..18: note = Description of Artificial Sequence: Synthetic Antisense oligonucleotide
  modified_base 1..2: mod_base = OTHER; note = bicyclic nucleic acid (BNA)
  modified_base 4..5: mod_base = OTHER; note = bicyclic nucleic acid (BNA)
  modified_base 17..18: mod_base = OTHER; note = bicyclic nucleic acid (BNA)
  modified_base 4: mod_base = OTHER; note = 5-methyl
  modified_base 13: mod_base = OTHER; note = 5-methyl
  modified_base 17..18: mod_base = OTHER; note = 5-methyl
  source 1..18: mol_type = other RNA
agtcggtaagttctgtcc

SEQ ID NO: 15523 - RNA, 18 nt, synthetic construct
  misc_feature 1..18: note = Description of Artificial Sequence: Synthetic Antisense oligonucleotide
  modified_base 1..2: mod_base = OTHER; note = bicyclic nucleic acid (BNA)
  modified_base 10: mod_base = OTHER; note = bicyclic nucleic acid (BNA)
  modified_base 13: mod_base = OTHER; note = bicyclic nucleic acid (BNA)
  modified_base 17..18: mod_base = OTHER; note = bicyclic nucleic acid (BNA)
  modified_base 4: mod_base = OTHER; note = 5-methyl
  modified_base 13: mod_base = OTHER; note = 5-methyl
  modified_base 17..18: mod_base = OTHER; note = 5-methyl
  source 1..18: mol_type = other RNA
agtcggtaagttctgtcc

SEQ ID NO: 15524 - DNA, 18 bp, synthetic construct
  misc_feature 1..18: note = Description of Artificial Sequence: Synthetic Antisense oligonucleotide
  misc_feature 1..18: note = Original Sequence: ctguccaagcccgguuga
  modified_base 1: mod_base = OTHER; note = 5-methyl
  modified_base 5..6: mod_base = OTHER; note = 5-methyl
  modified_base 10..12: mod_base = OTHER; note = 5-methyl
  modified_base 1..2: mod_base = OTHER; note = bicyclic nucleic acid (BNA)
  modified_base 6: mod_base = OTHER; note = bicyclic nucleic acid (BNA)
  modified_base 10: mod_base = OTHER; note = bicyclic nucleic acid (BNA)
  modified_base 17..18: mod_base = OTHER; note = bicyclic nucleic acid (BNA)
  source 1..18: mol_type = other DNA
  modified_base 4: mod_base = OTHER; note = Uracil
  modified_base 15: mod_base = OTHER; note = Uracil
  modified_base 16: mod_base = OTHER; note = Uracil
ctgtccaagcccggttga

SEQ ID NO: 15525 - DNA, 18 bp, synthetic construct
  misc_feature 1..18: note = Description of Artificial Sequence: Synthetic Antisense oligonucleotide
  misc_feature 1..18: note = Original Sequence: ctguccaagcccgguuga
  modified_base 1: mod_base = OTHER; note = 5-methyl
  modified_base 5..6: mod_base = OTHER; note = 5-methyl
  modified_base 10..12: mod_base = OTHER; note = 5-methyl
  modified_base 1..2: mod_base = OTHER; note = bicyclic nucleic acid (BNA)
  modified_base 9: mod_base = OTHER; note = bicyclic nucleic acid (BNA)
  modified_base 14: mod_base = OTHER; note = bicyclic nucleic acid (BNA)
  modified_base 17..18: mod_base = OTHER; note = bicyclic nucleic acid (BNA)
  source 1..18: mol_type = other DNA
  modified_base 4: mod_base = OTHER; note = Uracil
  modified_base 15: mod_base = OTHER; note = Uracil
  modified_base 16: mod_base = OTHER; note = Uracil
ctgtccaagcccggttga

SEQ ID NO: 15526 - DNA, 18 bp, synthetic construct
  misc_feature 1..18: note = Description of Artificial Sequence: Synthetic Antisense oligonucleotide
  misc_feature 1..18: note = Original Sequence: ctguccaagcccgguuga
  modified_base 1: mod_base = OTHER; note = 5-methyl
  modified_base 5..6: mod_base = OTHER; note = 5-methyl
  modified_base 10..12: mod_base = OTHER; note = 5-methyl
  modified_base 1..2: mod_base = OTHER; note = bicyclic nucleic acid (BNA)
  modified_base 11..12: mod_base = OTHER; note = bicyclic nucleic acid (BNA)
  modified_base 17..18: mod_base = OTHER; note = bicyclic nucleic acid (BNA)
  source 1..18: mol_type = other DNA
  modified_base 4: mod_base = OTHER; note = Uracil
  modified_base 15: mod_base = OTHER; note = Uracil
  modified_base 16: mod_base = OTHER; note = Uracil
ctgtccaagcccggttga

SEQ ID NO: 15527 - DNA, 18 bp, synthetic construct
  misc_feature 1..18: note = Description of Artificial Sequence: Synthetic Antisense oligonucleotide
  misc_feature 1..18: note = Original Sequence: ctguccaagcccgguuga
  modified_base 1: mod_base = OTHER; note = 5-methyl
  modified_base 5..6: mod_base = OTHER; note = 5-methyl
  modified_base 10..12: mod_base = OTHER; note = 5-methyl
  modified_base 1..2: mod_base = OTHER; note = bicyclic nucleic acid (BNA)
  modified_base 5: mod_base = OTHER; note = bicyclic nucleic acid (BNA)
  modified_base 9: mod_base = OTHER; note = bicyclic nucleic acid (BNA)
  modified_base 17..18: mod_base = OTHER; note = bicyclic nucleic acid (BNA)
  source 1..18: mol_type = other DNA
  modified_base 4: mod_base = OTHER; note = Uracil
  modified_base 15: mod_base = OTHER; note = Uracil
  modified_base 16: mod_base = OTHER; note = Uracil
ctgtccaagcccggttga

SEQ ID NO: 15528 - DNA, 18 bp, synthetic construct
  misc_feature 1..18: note = Description of Artificial Sequence: Synthetic Antisense oligonucleotide
  misc_feature 1..18: note = Original Sequence: ctguccaagcccgguuga
  modified_base 1: mod_base = OTHER; note = 5-methyl
  modified_base 5..6: mod_base = OTHER; note = 5-methyl
  modified_base 10..12: mod_base = OTHER; note = 5-methyl
  modified_base 1..3: mod_base = OTHER; note = bicyclic nucleic acid (BNA)
  modified_base 9: mod_base = OTHER; note = bicyclic nucleic acid (BNA)
  modified_base 17..18: mod_base = OTHER; note = bicyclic nucleic acid (BNA)
  source 1..18: mol_type = other DNA
  modified_base 4: mod_base = OTHER; note = Uracil
  modified_base 15: mod_base = OTHER; note = Uracil
  modified_base 16: mod_base = OTHER; note = Uracil
ctgtccaagcccggttga

SEQ ID NO: 15529 - DNA, 18 bp, synthetic construct
  misc_feature 1..18: note = Description of Artificial Sequence: Synthetic Antisense oligonucleotide
  misc_feature 1..18: note = Original Sequence: ctguccaagcccgguuga
  modified_base 1: mod_base = OTHER; note = 5-methyl
  modified_base 5..6: mod_base = OTHER; note = 5-methyl
  modified_base 10..12: mod_base = OTHER; note = 5-methyl
  modified_base 1..2: mod_base = OTHER; note = bicyclic nucleic acid (BNA)
  modified_base 6: mod_base = OTHER; note = bicyclic nucleic acid (BNA)
  modified_base 14: mod_base = OTHER; note = bicyclic nucleic acid (BNA)
  modified_base 17..18: mod_base = OTHER; note = bicyclic nucleic acid (BNA)
  source 1..18: mol_type = other DNA
  modified_base 4: mod_base = OTHER; note = Uracil
  modified_base 15: mod_base = OTHER; note = Uracil
  modified_base 16: mod_base = OTHER; note = Uracil
ctgtccaagcccggttga

SEQ ID NO: 15530 - DNA, 18 bp, synthetic construct
  misc_feature 1..18: note = Description of Artificial Sequence: Synthetic Antisense oligonucleotide
  misc_feature 1..18: note = Original Sequence: ctguccaagcccgguuga
  modified_base 1: mod_base = OTHER; note = 5-methyl
  modified_base 5..6: mod_base = OTHER; note = 5-methyl
  modified_base 10..12: mod_base = OTHER; note = 5-methyl
  modified_base 1..2: mod_base = OTHER; note = bicyclic nucleic acid (BNA)
  modified_base 9..10: mod_base = OTHER; note = bicyclic nucleic acid (BNA)
  modified_base 17..18: mod_base = OTHER; note = bicyclic nucleic acid (BNA)
  source 1..18: mol_type = other DNA
  modified_base 4: mod_base = OTHER; note = Uracil
  modified_base 15: mod_base = OTHER; note = Uracil
  modified_base 16: mod_base = OTHER; note = Uracil
ctgtccaagcccggttga

SEQ ID NO: 15531 - DNA, 18 bp, synthetic construct
  misc_feature 1..18: note = Description of Artificial Sequence: Synthetic Antisense oligonucleotide
  misc_feature 1..18: note = Original Sequence: ctguccaagcccgguuga
  modified_base 1: mod_base = OTHER; note = 5-methyl
  modified_base 5..6: mod_base = OTHER; note = 5-methyl
  modified_base 10..12: mod_base = OTHER; note = 5-methyl
  modified_base 1..2: mod_base = OTHER; note = bicyclic nucleic acid (BNA)
  modified_base 5: mod_base = OTHER; note = bicyclic nucleic acid (BNA)
  modified_base 13: mod_base = OTHER; note = bicyclic nucleic acid (BNA)
  modified_base 17..18: mod_base = OTHER; note = bicyclic nucleic acid (BNA)
  source 1..18: mol_type = other DNA
  modified_base 4: mod_base = OTHER; note = Uracil
  modified_base 15: mod_base = OTHER; note = Uracil
  modified_base 16: mod_base = OTHER; note = Uracil
ctgtccaagcccggttga

SEQ ID NO: 15532 - DNA, 18 bp, synthetic construct
  misc_feature 1..18: note = Description of Artificial Sequence: Synthetic Antisense oligonucleotide
  misc_feature 1..18: note = Original Sequence: ctguccaagcccgguuga
  modified_base 1: mod_base = OTHER; note = 5-methyl
  modified_base 5..6: mod_base = OTHER; note = 5-methyl
  modified_base 10..12: mod_base = OTHER; note = 5-methyl
  modified_base 1..3: mod_base = OTHER; note = bicyclic nucleic acid (BNA)
  modified_base 13: mod_base = OTHER; note = bicyclic nucleic acid (BNA)
  modified_base 17..18: mod_base = OTHER; note = bicyclic nucleic acid (BNA)
  source 1..18: mol_type = other DNA
  modified_base 4: mod_base = OTHER; note = Uracil
  modified_base 15: mod_base = OTHER; note = Uracil
  modified_base 16: mod_base = OTHER; note = Uracil
ctgtccaagcccggttga

SEQ ID NO: 15533 - DNA, 18 bp, synthetic construct
  misc_feature 1..18: note = Description of Artificial Sequence: Synthetic Antisense oligonucleotide
  misc_feature 1..18: note = Original Sequence: ctguccaagcccgguuga
  modified_base 1: mod_base = OTHER; note = 5-methyl
  modified_base 5..6: mod_base = OTHER; note = 5-methyl
  modified_base 10..12: mod_base = OTHER; note = 5-methyl
  modified_base 1..3: mod_base = OTHER; note = bicyclic nucleic acid (BNA)
  modified_base 6: mod_base = OTHER; note = bicyclic nucleic acid (BNA)
  modified_base 17..18: mod_base = OTHER; note = bicyclic nucleic acid (BNA)
  source 1..18: mol_type = other DNA
  modified_base 4: mod_base = OTHER; note = Uracil
  modified_base 15: mod_base = OTHER; note = Uracil
  modified_base 16: mod_base = OTHER; note = Uracil
ctgtccaagcccggttga

SEQ ID NO: 15534 - DNA, 18 bp, synthetic construct
  misc_feature 1..18: note = Description of Artificial Sequence: Synthetic Antisense oligonucleotide
  misc_feature 1..18: note = Original Sequence: ctguccaagcccgguuga
  modified_base 1: mod_base = OTHER; note = 5-methyl
  modified_base 5..6: mod_base = OTHER; note = 5-methyl
  modified_base 10..12: mod_base = OTHER; note = 5-methyl
  modified_base 1..2: mod_base = OTHER; note = bicyclic nucleic acid (BNA)
  modified_base 6: mod_base = OTHER; note = bicyclic nucleic acid (BNA)
  modified_base 9: mod_base = OTHER; note = bicyclic nucleic acid (BNA)
  modified_base 17..18: mod_base = OTHER; note = bicyclic nucleic acid (BNA)
  source 1..18: mol_type = other DNA
  modified_base 4: mod_base = OTHER; note = Uracil
  modified_base 15: mod_base = OTHER; note = Uracil
  modified_base 16: mod_base = OTHER; note = Uracil
ctgtccaagcccggttga

SEQ ID NO: 15535 - DNA, 18 bp, synthetic construct
  misc_feature 1..18: note = Description of Artificial Sequence: Synthetic Antisense oligonucleotide
  misc_feature 1..18: note = Original Sequence: ctguccaagcccgguuga
  modified_base 1: mod_base = OTHER; note = 5-methyl
  modified_base 5..6: mod_base = OTHER; note = 5-methyl
  modified_base 10..12: mod_base = OTHER; note = 5-methyl
  modified_base 1..2: mod_base = OTHER; note = bicyclic nucleic acid (BNA)
  modified_base 5: mod_base = OTHER; note = bicyclic nucleic acid (BNA)
  modified_base 10: mod_base = OTHER; note = bicyclic nucleic acid (BNA)
  modified_base 17..18: mod_base = OTHER; note = bicyclic nucleic acid (BNA)
  source 1..18: mol_type = other DNA
  modified_base 4: mod_base = OTHER; note = Uracil
  modified_base 15: mod_base = OTHER; note = Uracil
  modified_base 16: mod_base = OTHER; note = Uracil
ctgtccaagcccggttga

SEQ ID NO: 15536 - DNA, 18 bp, synthetic construct
  misc_feature 1..18: note = Description of Artificial Sequence: Synthetic Antisense oligonucleotide
  misc_feature 1..18: note = Original Sequence: ctguccaagcccgguuga
  modified_base 1: mod_base = OTHER; note = 5-methyl
  modified_base 5..6: mod_base = OTHER; note = 5-methyl
  modified_base 10..12: mod_base = OTHER; note = 5-methyl
  modified_base 1..3: mod_base = OTHER; note = bicyclic nucleic acid (BNA)
  modified_base 10: mod_base = OTHER; note = bicyclic nucleic acid (BNA)
  modified_base 17..18: mod_base = OTHER; note = bicyclic nucleic acid (BNA)
  source 1..18: mol_type = other DNA
  modified_base 4: mod_base = OTHER; note = Uracil
  modified_base 15: mod_base = OTHER; note = Uracil
  modified_base 16: mod_base = OTHER; note = Uracil
ctgtccaagcccggttga

SEQ ID NO: 15537 - DNA, 18 bp, synthetic construct
  misc_feature 1..18: note = Description of Artificial Sequence: Synthetic Antisense oligonucleotide
  misc_feature 1..18: note = Original Sequence: ctguccaagcccgguuga
  modified_base 1: mod_base = OTHER; note = 5-methyl
  modified_base 5..6: mod_base = OTHER; note = 5-methyl
  modified_base 10..12: mod_base = OTHER; note = 5-methyl
  modified_base 1..2: mod_base = OTHER; note = bicyclic nucleic acid (BNA)
  modified_base 13..14: mod_base = OTHER; note = bicyclic nucleic acid (BNA)
  modified_base 17..18: mod_base = OTHER; note = bicyclic nucleic acid (BNA)
  source 1..18: mol_type = other DNA
  modified_base 4: mod_base = OTHER; note = Uracil
  modified_base 15: mod_base = OTHER; note = Uracil
  modified_base 16: mod_base = OTHER; note = Uracil
ctgtccaagcccggttga

SEQ ID NO: 15538 - DNA, 18 bp, synthetic construct
  misc_feature 1..18: note = Description of Artificial Sequence: Synthetic Antisense oligonucleotide
  misc_feature 1..18: note = Original Sequence: ctguccaagcccgguuga
  modified_base 1: mod_base = OTHER; note = 5-methyl
  modified_base 5..6: mod_base = OTHER; note = 5-methyl
  modified_base 10..12: mod_base = OTHER; note = 5-methyl
  modified_base 1..2: mod_base = OTHER; note = bicyclic nucleic acid (BNA)
  modified_base 6: mod_base = OTHER; note = bicyclic nucleic acid (BNA)
  modified_base 13: mod_base = OTHER; note = bicyclic nucleic acid (BNA)
  modified_base 17..18: mod_base = OTHER; note = bicyclic nucleic acid (BNA)
  source 1..18: mol_type = other DNA
  modified_base 4: mod_base = OTHER; note = Uracil
  modified_base 15: mod_base = OTHER; note = Uracil
  modified_base 16: mod_base = OTHER; note = Uracil
ctgtccaagcccggttga

SEQ ID NO: 15539 - DNA, 18 bp, synthetic construct
  misc_feature 1..18: note = Description of Artificial Sequence: Synthetic Antisense oligonucleotide
  misc_feature 1..18: note = Original Sequence: ctguccaagcccgguuga
  modified_base 1: mod_base = OTHER; note = 5-methyl
  modified_base 5..6: mod_base = OTHER; note = 5-methyl
  modified_base 10..12: mod_base = OTHER; note = 5-methyl
  modified_base 1..2: mod_base = OTHER; note = bicyclic nucleic acid (BNA)
  modified_base 9: mod_base = OTHER; note = bicyclic nucleic acid (BNA)
  modified_base 11: mod_base = OTHER; note = bicyclic nucleic acid (BNA)
  modified_base 17..18: mod_base = OTHER; note = bicyclic nucleic acid (BNA)
  source 1..18: mol_type = other DNA
  modified_base 4: mod_base = OTHER; note = Uracil
  modified_base 15: mod_base = OTHER; note = Uracil
  modified_base 16: mod_base = OTHER; note = Uracil
ctgtccaagcccggttga

SEQ ID NO: 15540 - DNA, 18 bp, synthetic construct
  misc_feature 1..18: note = Description of Artificial Sequence: Synthetic Antisense oligonucleotide
  misc_feature 1..18: note = Original Sequence: ctguccaagcccgguuga
  modified_base 1: mod_base = OTHER; note = 5-methyl
  modified_base 5..6: mod_base = OTHER; note = 5-methyl
  modified_base 10..12: mod_base = OTHER; note = 5-methyl
  modified_base 1..2: mod_base = OTHER; note = bicyclic nucleic acid (BNA)
  modified_base 11: mod_base = OTHER; note = bicyclic nucleic acid (BNA)
  modified_base 13: mod_base = OTHER; note = bicyclic nucleic acid (BNA)
  modified_base 17..18: mod_base = OTHER; note = bicyclic nucleic acid (BNA)
  source 1..18: mol_type = other DNA
  modified_base 4: mod_base = OTHER; note = Uracil
  modified_base 15: mod_base = OTHER; note = Uracil
  modified_base 16: mod_base = OTHER; note = Uracil
ctgtccaagcccggttga

SEQ ID NO: 15541 - DNA, 18 bp, synthetic construct
  misc_feature 1..18: note = Description of Artificial Sequence: Synthetic Antisense oligonucleotide
  misc_feature 1..18: note = Original Sequence: ctguccaagcccgguuga
  modified_base 1: mod_base = OTHER; note = 5-methyl
  modified_base 5..6: mod_base = OTHER; note = 5-methyl
  modified_base 10..12: mod_base = OTHER; note = 5-methyl
  modified_base 1..2: mod_base = OTHER; note = bicyclic nucleic acid (BNA)
  modified_base 5: mod_base = OTHER; note = bicyclic nucleic acid (BNA)
  modified_base 14: mod_base = OTHER; note = bicyclic nucleic acid (BNA)
  modified_base 17..18: mod_base = OTHER; note = bicyclic nucleic acid (BNA)
  source 1..18: mol_type = other DNA
  modified_base 4: mod_base = OTHER; note = Uracil
  modified_base 15: mod_base = OTHER; note = Uracil
  modified_base 16: mod_base = OTHER; note = Uracil
ctgtccaagcccggttga

SEQ ID NO: 15542 - DNA, 18 bp, synthetic construct
  misc_feature 1..18: note = Description of Artificial Sequence: Synthetic Antisense oligonucleotide
  misc_feature 1..18: note = Original Sequence: ctguccaagcccgguuga
  modified_base 1: mod_base = OTHER; note = 5-methyl
  modified_base 5..6: mod_base = OTHER; note = 5-methyl
  modified_base 10..12: mod_base = OTHER; note = 5-methyl
  modified_base 1..3: mod_base = OTHER; note = bicyclic nucleic acid (BNA)
  modified_base 14: mod_base = OTHER; note = bicyclic nucleic acid (BNA)
  modified_base 17..18: mod_base = OTHER; note = bicyclic nucleic acid (BNA)
  source 1..18: mol_type = other DNA
  modified_base 4: mod_base = OTHER; note = Uracil
  modified_base 15: mod_base = OTHER; note = Uracil
  modified_base 16: mod_base = OTHER; note = Uracil
ctgtccaagcccggttga

SEQ ID NO: 15543 - DNA, 18 bp, synthetic construct
  misc_feature 1..18: note = Description of Artificial Sequence: Synthetic Antisense oligonucleotide
  misc_feature 1..18: note = Original Sequence: ctguccaagcccgguuga
  modified_base 1: mod_base = OTHER; note = 5-methyl
  modified_base 5..6: mod_base = OTHER; note = 5-methyl
  modified_base 10..12: mod_base = OTHER; note = 5-methyl
  modified_base 1..2: mod_base = OTHER; note = bicyclic nucleic acid (BNA)
  modified_base 10: mod_base = OTHER; note = bicyclic nucleic acid (BNA)
  modified_base 12: mod_base = OTHER; note = bicyclic nucleic acid (BNA)
  modified_base 17..18: mod_base = OTHER; note = bicyclic nucleic acid (BNA)
  source 1..18: mol_type = other DNA
  modified_base 4: mod_base = OTHER; note = Uracil
  modified_base 15: mod_base = OTHER; note = Uracil
  modified_base 16: mod_base = OTHER; note = Uracil
ctgtccaagcccggttga

SEQ ID NO: 15544 - DNA, 18 bp, synthetic construct
  misc_feature 1..18: note = Description of Artificial Sequence: Synthetic Antisense oligonucleotide
  misc_feature 1..18: note = Original Sequence: ctguccaagcccgguuga
  modified_base 1: mod_base = OTHER; note = 5-methyl
  modified_base 5..6: mod_base = OTHER; note = 5-methyl
  modified_base 10..12: mod_base = OTHER; note = 5-methyl
  modified_base 1..2: mod_base = OTHER; note = bicyclic nucleic acid (BNA)
  modified_base 12: mod_base = OTHER; note = bicyclic nucleic acid (BNA)
  modified_base 14: mod_base = OTHER; note = bicyclic nucleic acid (BNA)
  modified_base 17..18: mod_base = OTHER; note = bicyclic nucleic acid (BNA)
  source 1..18: mol_type = other DNA
  modified_base 4: mod_base = OTHER; note = Uracil
  modified_base 15: mod_base = OTHER; note = Uracil
  modified_base 16: mod_base = OTHER; note = Uracil
ctgtccaagcccggttga

SEQ ID NO: 15545 - DNA, 18 bp, synthetic construct
  misc_feature 1..18: note = Description of Artificial Sequence: Synthetic Antisense oligonucleotide
  misc_feature 1..18: note = Original Sequence: ctguccaagcccgguuga
  modified_base 1: mod_base = OTHER; note = 5-methyl
  modified_base 5..6: mod_base = OTHER; note = 5-methyl
  modified_base 10..12: mod_base = OTHER; note = 5-methyl
  modified_base 1..2: mod_base = OTHER; note = bicyclic nucleic acid (BNA)
  modified_base 5: mod_base = OTHER; note = bicyclic nucleic acid (BNA)
  modified_base 11: mod_base = OTHER; note = bicyclic nucleic acid (BNA)
  modified_base 17..18: mod_base = OTHER; note = bicyclic nucleic acid (BNA)
  source 1..18: mol_type = other DNA
  modified_base 4: mod_base = OTHER; note = Uracil
  modified_base 15: mod_base = OTHER; note = Uracil
  modified_base 16: mod_base = OTHER; note = Uracil
ctgtccaagcccggttga

SEQ ID NO: 15546 - DNA, 18 bp, synthetic construct
  misc_feature 1..18: note = Description of Artificial Sequence: Synthetic Antisense oligonucleotide
  misc_feature 1..18: note = Original Sequence: ctguccaagcccgguuga
  modified_base 1: mod_base = OTHER; note = 5-methyl
  modified_base 5..6: mod_base = OTHER; note = 5-methyl
  modified_base 10..12: mod_base = OTHER; note = 5-methyl
  modified_base 1..2: mod_base = OTHER; note = bicyclic nucleic acid (BNA)
  modified_base 6: mod_base = OTHER; note = bicyclic nucleic acid (BNA)
  modified_base 12: mod_base = OTHER; note = bicyclic nucleic acid (BNA)
  modified_base 17..18: mod_base = OTHER; note = bicyclic nucleic acid (BNA)
  source 1..18: mol_type = other DNA
  modified_base 4: mod_base = OTHER; note = Uracil
  modified_base 15: mod_base = OTHER; note = Uracil
  modified_base 16: mod_base = OTHER; note = Uracil
ctgtccaagcccggttga

SEQ ID NO: 15547 - DNA, 18 bp, synthetic construct
  misc_feature 1..18: note = Description of Artificial Sequence: Synthetic Antisense oligonucleotide
  misc_feature 1..18: note = Original Sequence: ctguccaagcccgguuga
  modified_base 1: mod_base = OTHER; note = 5-methyl
  modified_base 5..6: mod_base = OTHER; note = 5-methyl
  modified_base 10..12: mod_base = OTHER; note = 5-methyl
  modified_base 1..2: mod_base = OTHER; note = bicyclic nucleic acid (BNA)
  modified_base 5..6: mod_base = OTHER; note = bicyclic nucleic acid (BNA)
  modified_base 17..18: mod_base = OTHER; note = bicyclic nucleic acid (BNA)
  source 1..18: mol_type = other DNA
  modified_base 4: mod_base = OTHER; note = Uracil
  modified_base 15: mod_base = OTHER; note = Uracil
  modified_base 16: mod_base = OTHER; note = Uracil
ctgtccaagcccggttga

SEQ ID NO: 15548 - DNA, 18 bp, synthetic construct
  misc_feature 1..18: note = Description of Artificial Sequence: Synthetic Antisense oligonucleotide
  misc_feature 1..18: note = Original Sequence: ctguccaagcccgguuga
  modified_base 1: mod_base = OTHER; note = 5-methyl
  modified_base 5..6: mod_base = OTHER; note = 5-methyl
  modified_base 10..12: mod_base = OTHER; note = 5-methyl
  modified_base 1..2: mod_base = OTHER; note = bicyclic nucleic acid (BNA)
  modified_base 11: mod_base = OTHER; note = bicyclic nucleic acid (BNA)
  modified_base 14: mod_base = OTHER; note = bicyclic nucleic acid (BNA)
  modified_base 17..18: mod_base = OTHER; note = bicyclic nucleic acid (BNA)
  source 1..18: mol_type = other DNA
  modified_base 4: mod_base = OTHER; note = Uracil
  modified_base 15: mod_base = OTHER; note = Uracil
  modified_base 16: mod_base = OTHER; note = Uracil
ctgtccaagcccggttga

SEQ ID NO: 15549 - DNA, 18 bp, synthetic construct
  misc_feature 1..18: note = Description of Artificial Sequence: Synthetic Antisense oligonucleotide
  misc_feature 1..18: note = Original Sequence: ctguccaagcccgguuga
  modified_base 1: mod_base = OTHER; note = 5-methyl
  modified_base 5..6: mod_base = OTHER; note = 5-methyl
  modified_base 10..12: mod_base = OTHER; note = 5-methyl
  modified_base 1..2: mod_base = OTHER; note = bicyclic nucleic acid (BNA)
  modified_base 9: mod_base = OTHER; note = bicyclic nucleic acid (BNA)
  modified_base 12: mod_base = OTHER; note = bicyclic nucleic acid (BNA)
  modified_base 17..18: mod_base = OTHER; note = bicyclic nucleic acid (BNA)
  source 1..18: mol_type = other DNA
  modified_base 4: mod_base = OTHER; note = Uracil
  modified_base 15: mod_base = OTHER; note = Uracil
  modified_base 16: mod_base = OTHER; note = Uracil
ctgtccaagcccggttga

SEQ ID NO: 15550 - DNA, 18 bp, synthetic construct
  misc_feature 1..18: note = Description of Artificial Sequence: Synthetic Antisense oligonucleotide
  misc_feature 1..18: note = Original Sequence: ctguccaagcccgguuga
  modified_base 1: mod_base = OTHER; note = 5-methyl
  modified_base 5..6: mod_base = OTHER; note = 5-methyl
  modified_base 10..12: mod_base = OTHER; note = 5-methyl
  modified_base 1..3: mod_base = OTHER; note = bicyclic nucleic acid (BNA)
  modified_base 11: mod_base = OTHER; note = bicyclic nucleic acid (BNA)
  modified_base 17..18: mod_base = OTHER; note = bicyclic nucleic acid (BNA)
  source 1..18: mol_type = other DNA
  modified_base 4: mod_base = OTHER; note = Uracil
  modified_base 15: mod_base = OTHER; note = Uracil
  modified_base 16: mod_base = OTHER; note = Uracil
ctgtccaagcccggttga

SEQ ID NO: 15551 - DNA, 18 bp, synthetic construct
  misc_feature 1..18: note = Description of Artificial Sequence: Synthetic Antisense oligonucleotide
  misc_feature 1..18: note = Original Sequence: ctguccaagcccgguuga
  modified_base 1: mod_base = OTHER; note = 5-methyl
  modified_base 5..6: mod_base = OTHER; note = 5-methyl
  modified_base 10..12: mod_base = OTHER; note = 5-methyl
  modified_base 1..2: mod_base = OTHER; note = bicyclic nucleic acid (BNA)
  modified_base 10..11: mod_base = OTHER; note = bicyclic nucleic acid (BNA)
  modified_base 17..18: mod_base = OTHER; note = bicyclic nucleic acid (BNA)
  source 1..18: mol_type = other DNA
  modified_base 4: mod_base = OTHER; note = Uracil
  modified_base 15: mod_base = OTHER; note = Uracil
  modified_base 16: mod_base = OTHER; note = Uracil
ctgtccaagcccggttga

SEQ ID NO: 15552 - DNA, 18 bp, synthetic construct
  misc_feature 1..18: note = Description of Artificial Sequence: Synthetic Antisense oligonucleotide
  misc_feature 1..18: note = Original Sequence: ctguccaagcccgguuga
  modified_base 1: mod_base = OTHER; note = 5-methyl
  modified_base 5..6: mod_base = OTHER; note = 5-methyl
  modified_base 10..12: mod_base = OTHER; note = 5-methyl
  modified_base 1..2: mod_base = OTHER; note = bicyclic nucleic acid (BNA)
  modified_base 12..13: mod_base = OTHER; note = bicyclic nucleic acid (BNA)
  modified_base 17..18: mod_base = OTHER; note = bicyclic nucleic acid (BNA)
  source 1..18: mol_type = other DNA
  modified_base 4: mod_base = OTHER; note = Uracil
  modified_base 15: mod_base = OTHER; note = Uracil
  modified_base 16: mod_base = OTHER; note = Uracil
ctgtccaagcccggttga

SEQ ID NO: 15553 - DNA, 18 bp, synthetic construct
  misc_feature 1..18: note = Description of Artificial Sequence: Synthetic Antisense oligonucleotide
  misc_feature 1..18: note = Original Sequence: ctguccaagcccgguuga
  modified_base 1: mod_base = OTHER; note = 5-methyl
  modified_base 5..6: mod_base = OTHER; note = 5-methyl
  modified_base 10..12: mod_base = OTHER; note = 5-methyl
  modified_base 1..2: mod_base = OTHER; note = bicyclic nucleic acid (BNA)
  modified_base 5: mod_base = OTHER; note = bicyclic nucleic acid (BNA)
  modified_base 12: mod_base = OTHER; note = bicyclic nucleic acid (BNA)
  modified_base 17..18: mod_base = OTHER; note = bicyclic nucleic acid (BNA)
  source 1..18: mol_type = other DNA
  modified_base 4: mod_base = OTHER; note = Uracil
  modified_base 15: mod_base = OTHER; note = Uracil
  modified_base 16: mod_base = OTHER; note = Uracil
ctgtccaagcccggttga

SEQ ID NO: 15554 - DNA, 18 bp, synthetic construct
  misc_feature 1..18: note = Description of Artificial Sequence: Synthetic Antisense oligonucleotide
  misc_feature 1..18: note = Original Sequence: ctguccaagcccgguuga
  modified_base 1: mod_base = OTHER; note = 5-methyl
  modified_base 5..6: mod_base = OTHER; note = 5-methyl
  modified_base 10..12: mod_base = OTHER; note = 5-methyl
  modified_base 1..2: mod_base = OTHER; note = bicyclic nucleic acid (BNA)
  modified_base 10: mod_base = OTHER; note = bicyclic nucleic acid (BNA)
  modified_base 14: mod_base = OTHER; note = bicyclic nucleic acid (BNA)
  modified_base 17..18: mod_base = OTHER; note = bicyclic nucleic acid (BNA)
  source 1..18: mol_type = other DNA
  modified_base 4: mod_base = OTHER; note = Uracil
  modified_base 15: mod_base = OTHER; note = Uracil
  modified_base 16: mod_base = OTHER; note = Uracil
ctgtccaagcccggttga

SEQ ID NO: 15555 - DNA, 18 bp, synthetic construct
  misc_feature 1..18: note = Description of Artificial Sequence: Synthetic Antisense oligonucleotide
  misc_feature 1..18: note = Original Sequence: ctguccaagcccgguuga
  modified_base 1: mod_base = OTHER; note = 5-methyl
  modified_base 5..6: mod_base = OTHER; note = 5-methyl
  modified_base 10..12: mod_base = OTHER; note = 5-methyl
  modified_base 1..2: mod_base = OTHER; note = bicyclic nucleic acid (BNA)
  modified_base 6: mod_base = OTHER; note = bicyclic nucleic acid (BNA)
  modified_base 11: mod_base = OTHER; note = bicyclic nucleic acid (BNA)
  modified_base 17..18: mod_base = OTHER; note = bicyclic nucleic acid (BNA)
  source 1..18: mol_type = other DNA
  modified_base 4: mod_base = OTHER; note = Uracil
  modified_base 15: mod_base = OTHER; note = Uracil
  modified_base 16: mod_base = OTHER; note = Uracil
ctgtccaagcccggttga

SEQ ID NO: 15556 - DNA, 18 bp, synthetic construct
  misc_feature 1..18: note = Description of Artificial Sequence: Synthetic Antisense oligonucleotide
  misc_feature 1..18: note = Original Sequence: ctguccaagcccgguuga
  modified_base 1: mod_base = OTHER; note = 5-methyl
  modified_base 5..6: mod_base = OTHER; note = 5-methyl
  modified_base 10..12: mod_base = OTHER; note = 5-methyl
  modified_base 1..2: mod_base = OTHER; note = bicyclic nucleic acid (BNA)
  modified_base 9: mod_base = OTHER; note = bicyclic nucleic acid (BNA)
  modified_base 13: mod_base = OTHER; note = bicyclic nucleic acid (BNA)
  modified_base 17..18: mod_base = OTHER; note = bicyclic nucleic acid (BNA)
  source 1..18: mol_type = other DNA
  modified_base 4: mod_base = OTHER; note = Uracil
  modified_base 15: mod_base = OTHER; note = Uracil
  modified_base 16: mod_base = OTHER; note = Uracil
ctgtccaagcccggttga

SEQ ID NO: 15557 - DNA, 18 bp, synthetic construct
  misc_feature 1..18: note = Description of Artificial Sequence: Synthetic Antisense oligonucleotide
  misc_feature 1..18: note = Original Sequence: ctguccaagcccgguuga
  modified_base 1: mod_base = OTHER; note = 5-methyl
  modified_base 5..6: mod_base = OTHER; note = 5-methyl
  modified_base 10..12: mod_base = OTHER; note = 5-methyl
  modified_base 1..3: mod_base = OTHER; note = bicyclic nucleic acid (BNA)
  modified_base 12: mod_base = OTHER; note = bicyclic nucleic acid (BNA)
  modified_base 17..18: mod_base = OTHER; note = bicyclic nucleic acid (BNA)
  source 1..18: mol_type = other DNA
  modified_base 4: mod_base = OTHER; note = Uracil
  modified_base 15: mod_base = OTHER; note = Uracil
  modified_base 16: mod_base = OTHER; note = Uracil
ctgtccaagcccggttga

SEQ ID NO: 15558 - DNA, 18 bp, synthetic construct
  misc_feature 1..18: note = Description of Artificial Sequence: Synthetic Antisense oligonucleotide
  misc_feature 1..18: note = Original Sequence: ctguccaagcccgguuga
  modified_base 1: mod_base = OTHER; note = 5-methyl
  modified_base 5..6: mod_base = OTHER; note = 5-methyl
  modified_base 10..12: mod_base = OTHER; note = 5-methyl
  modified_base 1..3: mod_base = OTHER; note = bicyclic nucleic acid (BNA)
  modified_base 5: mod_base = OTHER; note = bicyclic nucleic acid (BNA)
  modified_base 17..18: mod_base = OTHER; note = bicyclic nucleic acid (BNA)
  source 1..18: mol_type = other DNA
  modified_base 4: mod_base = OTHER; note = Uracil
  modified_base 15: mod_base = OTHER; note = Uracil
  modified_base 16: mod_base = OTHER; note = Uracil
ctgtccaagcccggttga

SEQ ID NO: 15559 - DNA, 18 bp, synthetic construct
  misc_feature 1..18: note = Description of Artificial Sequence: Synthetic Antisense oligonucleotide
  misc_feature 1..18: note = Original Sequence: ctguccaagcccgguuga
  modified_base 1: mod_base = OTHER; note = 5-methyl
  modified_base 5..6: mod_base = OTHER; note = 5-methyl
  modified_base 10..12: mod_base = OTHER; note = 5-methyl
  modified_base 1..2: mod_base = OTHER; note = bicyclic nucleic acid (BNA)
  modified_base 10: mod_base = OTHER; note = bicyclic nucleic acid (BNA)
  modified_base 13: mod_base = OTHER; note = bicyclic nucleic acid (BNA)
  modified_base 17..18: mod_base = OTHER; note = bicyclic nucleic acid (BNA)
  source 1..18: mol_type = other DNA
  modified_base 4: mod_base = OTHER; note = Uracil
  modified_base 15: mod_base = OTHER; note = Uracil
  modified_base 16: mod_base = OTHER; note = Uracil
ctgtccaagcccggttga

SEQ ID NO: 15560 - DNA, 20 bp, synthetic construct
  misc_feature 1..20: note = Description of Artificial Sequence: Synthetic Antisense oligonucleotide
  misc_feature 1..20: note = Original Sequence: tcaaggaagauggcauuuct
  modified_base 1..2: mod_base = OTHER; note = bicyclic nucleic acid (BNA)
  modified_base 9: mod_base = OTHER; note = bicyclic nucleic acid (BNA)
  modified_base 19..20: mod_base = OTHER; note = bicyclic nucleic acid (BNA)
  modified_base 2: mod_base = OTHER; note = 5-methyl
  modified_base 14: mod_base = OTHER; note = 5-methyl
  modified_base 19: mod_base = OTHER; note = 5-methyl
  source 1..20: mol_type = other DNA
  modified_base 11: mod_base = OTHER; note = Uracil
  modified_base 16: mod_base = OTHER; note = Uracil
  modified_base 17: mod_base = OTHER; note = Uracil
  modified_base 18: mod_base = OTHER; note = Uracil
tcaaggaagatggcatttct

SEQ ID NO: 15561 - DNA, 20 bp, synthetic construct
  misc_feature 1..20: note = Description of Artificial Sequence: Synthetic Antisense oligonucleotide
  misc_feature 1..20: note = Original Sequence: tcaaggaagauggcauuuct
  modified_base 1..2: mod_base = OTHER; note = bicyclic nucleic acid (BNA)
  modified_base 5: mod_base = OTHER; note = bicyclic nucleic acid (BNA)
  modified_base 19..20: mod_base = OTHER; note = bicyclic nucleic acid (BNA)
  modified_base 2: mod_base = OTHER; note = 5-methyl
  modified_base 14: mod_base = OTHER; note = 5-methyl
  modified_base 19: mod_base = OTHER; note = 5-methyl
  source 1..20: mol_type = other DNA
  modified_base 11: mod_base = OTHER; note = Uracil
  modified_base 16: mod_base = OTHER; note = Uracil
  modified_base 17: mod_base = OTHER; note = Uracil
  modified_base 18: mod_base = OTHER; note = Uracil
tcaaggaagatggcatttct

SEQ ID NO: 15562 - DNA, 20 bp, synthetic construct
  misc_feature 1..20: note = Description of Artificial Sequence: Synthetic Antisense oligonucleotide
  misc_feature 1..20: note = Original Sequence: tcaaggaagauggcauuuct
  modified_base 1..2: mod_base = OTHER; note = bicyclic nucleic acid (BNA)
  modified_base 6: mod_base = OTHER; note = bicyclic nucleic acid (BNA)
  modified_base 19..20: mod_base = OTHER; note = bicyclic nucleic acid (BNA)
  modified_base 2: mod_base = OTHER; note = 5-methyl
  modified_base 14: mod_base = OTHER; note = 5-methyl
  modified_base 19: mod_base = OTHER; note = 5-methyl
  source 1..20: mol_type = other DNA
  modified_base 11: mod_base = OTHER; note = Uracil
  modified_base 16: mod_base = OTHER; note = Uracil
  modified_base 17: mod_base = OTHER; note = Uracil
  modified_base 18: mod_base = OTHER; note = Uracil
tcaaggaagatggcatttct

SEQ ID NO: 15563 - DNA, 20 bp, synthetic construct
  misc_feature 1..20: note = Description of Artificial Sequence: Synthetic Antisense oligonucleotide
  misc_feature 1..20: note = Original Sequence: tcaaggaagauggcauuuct
  modified_base 1..2: mod_base = OTHER; note = bicyclic nucleic acid (BNA)
  modified_base 12: mod_base = OTHER; note = bicyclic nucleic acid (BNA)
  modified_base 19..20: mod_base = OTHER; note = bicyclic nucleic acid (BNA)
  modified_base 2: mod_base = OTHER; note = 5-methyl
  modified_base 14: mod_base = OTHER; note = 5-methyl
  modified_base 19: mod_base = OTHER; note = 5-methyl
  source 1..20: mol_type = other DNA
  modified_base 11: mod_base = OTHER; note = Uracil
  modified_base 16: mod_base = OTHER; note = Uracil
  modified_base 17: mod_base = OTHER; note = Uracil
  modified_base 18: mod_base = OTHER; note = Uracil
tcaaggaagatggcatttct

SEQ ID NO: 15564 - DNA, 20 bp, synthetic construct
  misc_feature 1..20: note = Description of Artificial Sequence: Synthetic Antisense oligonucleotide
  misc_feature 1..20: note = Original Sequence: tcaaggaagauggcauuuct
  modified_base 1..2: mod_base = OTHER; note = bicyclic nucleic acid (BNA)
  modified_base 13: mod_base = OTHER; note = bicyclic nucleic acid (BNA)
  modified_base 19..20: mod_base = OTHER; note = bicyclic nucleic acid (BNA)
  modified_base 2: mod_base = OTHER; note = 5-methyl
  modified_base 14: mod_base = OTHER; note = 5-methyl
  modified_base 19: mod_base = OTHER; note = 5-methyl
  source 1..20: mol_type = other DNA
  modified_base 11: mod_base = OTHER; note = Uracil
  modified_base 16: mod_base = OTHER; note = Uracil
  modified_base 17: mod_base = OTHER; note = Uracil
  modified_base 18: mod_base = OTHER; note = Uracil
tcaaggaagatggcatttct

SEQ ID NO: 15565 - DNA, 20 bp, synthetic construct
  misc_feature 1..20: note = Description of Artificial Sequence: Synthetic Antisense oligonucleotide
  misc_feature 1..20: note = Original Sequence: tcaaggaagauggcauuuct
  modified_base 1..2: mod_base = OTHER; note = bicyclic nucleic acid (BNA)
  modified_base 14: mod_base = OTHER; note = bicyclic nucleic acid (BNA)
  modified_base 19..20: mod_base = OTHER; note = bicyclic nucleic acid (BNA)
  modified_base 2: mod_base = OTHER; note = 5-methyl
  modified_base 14: mod_base = OTHER; note = 5-methyl
  modified_base 19: mod_base = OTHER; note = 5-methyl
  source 1..20: mol_type = other DNA
  modified_base 11: mod_base = OTHER; note = Uracil
  modified_base 16: mod_base = OTHER; note = Uracil
  modified_base 17: mod_base = OTHER; note = Uracil
  modified_base 18: mod_base = OTHER; note = Uracil
tcaaggaagatggcatttct

SEQ ID NO: 15566 - DNA, 22 bp, synthetic construct
  misc_feature 1..22: note = Description of Artificial Sequence: Synthetic Antisense oligonucleotide
  misc_feature 1..22: note = Original Sequence: tcaaggaagauggcauuucuag
  modified_base 1..2: mod_base = OTHER; note = bicyclic nucleic acid (BNA)
  modified_base 9: mod_base = OTHER; note = bicyclic nucleic acid (BNA)
  modified_base 21..22: mod_base = OTHER; note = bicyclic nucleic acid (BNA)
  modified_base 2: mod_base = OTHER; note = 5-methyl
  modified_base 14: mod_base = OTHER; note = 5-methyl
  modified_base 19: mod_base = OTHER; note = 5-methyl
  source 1..22: mol_type = other DNA
  modified_base 11: mod_base = OTHER; note = Uracil
  modified_base 16: mod_base = OTHER; note = Uracil
  modified_base 17: mod_base = OTHER; note = Uracil
  modified_base 18: mod_base = OTHER; note = Uracil
  modified_base 20: mod_base = OTHER; note = Uracil
tcaaggaagatggcatttctag

SEQ ID NO: 15567 - DNA, 22 bp, synthetic construct
  misc_feature 1..22: note = Description of Artificial Sequence: Synthetic Antisense oligonucleotide
  misc_feature 1..22: note = Original Sequence: tcaaggaagauggcauuucuag
  modified_base 1..2: mod_base = OTHER; note = bicyclic nucleic acid (BNA)
  modified_base 5: mod_base = OTHER; note = bicyclic nucleic acid (BNA)
  modified_base 21..22: mod_base = OTHER; note = bicyclic nucleic acid (BNA)
  modified_base 2: mod_base = OTHER; note = 5-methyl
  modified_base 14: mod_base = OTHER; note = 5-methyl
  modified_base 19: mod_base = OTHER; note = 5-methyl
  source 1..22: mol_type = other DNA
  modified_base 11: mod_base = OTHER; note = Uracil
  modified_base 16: mod_base = OTHER; note = Uracil
  modified_base 17: mod_base = OTHER; note = Uracil
  modified_base 18: mod_base = OTHER; note = Uracil
  modified_base 20: mod_base = OTHER; note = Uracil
tcaaggaagatggcatttctag

SEQ ID NO: 15568 - DNA, 22 bp, synthetic construct
  misc_feature 1..22: note = Description of Artificial Sequence: Synthetic Antisense oligonucleotide
  misc_feature 1..22: note = Original Sequence: tcaaggaagauggcauuucuag
  modified_base 1..2: mod_base = OTHER; note = bicyclic nucleic acid (BNA)
  modified_base 6: mod_base = OTHER; note = bicyclic nucleic acid (BNA)
  modified_base 21..22: mod_base = OTHER; note = bicyclic nucleic acid (BNA)
  modified_base 2: mod_base = OTHER; note = 5-methyl
  modified_base 14: mod_base = OTHER; note = 5-methyl
  modified_base 19: mod_base = OTHER; note = 5-methyl
  source 1..22: mol_type = other DNA
  modified_base 11: mod_base = OTHER; note = Uracil
  modified_base 16: mod_base = OTHER; note = Uracil
  modified_base 17: mod_base = OTHER; note = Uracil
  modified_base 18: mod_base = OTHER; note = Uracil
  modified_base 20: mod_base = OTHER; note = Uracil
tcaaggaagatggcatttctag

SEQ ID NO: 15569 - DNA, 22 bp, synthetic construct
  misc_feature 1..22: note = Description of Artificial Sequence: Synthetic Antisense oligonucleotide
  misc_feature 1..22: note = Original Sequence: tcaaggaagauggcauuucuag
  modified_base 1..2: mod_base = OTHER; note = bicyclic nucleic acid (BNA)
  modified_base 12: mod_base = OTHER; note = bicyclic nucleic acid (BNA)
  modified_base 21..22: mod_base = OTHER; note = bicyclic nucleic acid (BNA)
  modified_base 2: mod_base = OTHER; note = 5-methyl
  modified_base 14: mod_base = OTHER; note = 5-methyl
  modified_base 19: mod_base = OTHER; note = 5-methyl
  source 1..22: mol_type = other DNA
  modified_base 11: mod_base = OTHER; note = Uracil
  modified_base 16: mod_base = OTHER; note = Uracil
  modified_base 17: mod_base = OTHER; note = Uracil
  modified_base 18: mod_base = OTHER; note = Uracil
  modified_base 20: mod_base = OTHER; note = Uracil
tcaaggaagatggcatttctag

SEQ ID NO: 15570 - DNA, 22 bp, synthetic construct
  misc_feature 1..22: note = Description of Artificial Sequence: Synthetic Antisense oligonucleotide
  misc_feature 1..22: note = Original Sequence: tcaaggaagauggcauuucuag
  modified_base 1..2: mod_base = OTHER; note = bicyclic nucleic acid (BNA)
  modified_base 13: mod_base = OTHER; note = bicyclic nucleic acid (BNA)
  modified_base 21..22: mod_base = OTHER; note = bicyclic nucleic acid (BNA)
  modified_base 2: mod_base = OTHER; note = 5-methyl
  modified_base 14: mod_base = OTHER; note = 5-methyl
  modified_base 19: mod_base = OTHER; note = 5-methyl
  source 1..22: mol_type = other DNA
  modified_base 11: mod_base = OTHER; note = Uracil
  modified_base 16: mod_base = OTHER; note = Uracil
  modified_base 17: mod_base = OTHER; note = Uracil
  modified_base 18: mod_base = OTHER; note = Uracil
  modified_base 20: mod_base = OTHER; note = Uracil
tcaaggaagatggcatttctag

SEQ ID NO: 15571 - DNA, 22 bp, synthetic construct
  misc_feature 1..22: note = Description of Artificial Sequence: Synthetic Antisense oligonucleotide
  misc_feature 1..22: note = Original Sequence: tcaaggaagauggcauuucuag
  modified_base 1..2: mod_base = OTHER; note = bicyclic nucleic acid (BNA)
  modified_base 19: mod_base = OTHER; note = bicyclic nucleic acid (BNA)
  modified_base 21..22: mod_base = OTHER; note = bicyclic nucleic acid (BNA)
  modified_base 2: mod_base = OTHER; note = 5-methyl
  modified_base 14: mod_base = OTHER; note = 5-methyl
  modified_base 19: mod_base = OTHER; note = 5-methyl
  source 1..22: mol_type = other DNA
  modified_base 11: mod_base = OTHER; note = Uracil
  modified_base 16: mod_base = OTHER; note = Uracil
  modified_base 17: mod_base = OTHER; note = Uracil
  modified_base 18: mod_base = OTHER; note = Uracil
  modified_base 20: mod_base = OTHER; note = Uracil
tcaaggaagatggcatttctag

SEQ ID NO: 15572 - DNA, 22 bp, synthetic construct
  misc_feature 1..22: note = Description of Artificial Sequence: Synthetic Antisense oligonucleotide
  misc_feature 1..22: note = Original Sequence: tcaaggaagauggcauuucuag
  modified_base 1..2: mod_base = OTHER; note = bicyclic nucleic acid (BNA)
  modified_base 14: mod_base = OTHER; note = bicyclic nucleic acid (BNA)
  modified_base 21..22: mod_base = OTHER; note = bicyclic nucleic acid (BNA)
  modified_base 2: mod_base = OTHER; note = 5-methyl
  modified_base 14: mod_base = OTHER; note = 5-methyl
  modified_base 19: mod_base = OTHER; note = 5-methyl
  source 1..22: mol_type = other DNA
  modified_base 11: mod_base = OTHER; note = Uracil
  modified_base 16: mod_base = OTHER; note = Uracil
  modified_base 17: mod_base = OTHER; note = Uracil
  modified_base 18: mod_base = OTHER; note = Uracil
  modified_base 20: mod_base = OTHER; note = Uracil
tcaaggaagatggcatttctag

SEQ ID NO: 15573 - DNA, 20 bp, synthetic construct
  misc_feature 1..20: note = Description of Artificial Sequence: Synthetic Antisense oligonucleotide
  misc_feature 1..20: note = Original Sequence: tcaaggaagauggcauuuct
  modified_base 1..2: mod_base = OTHER; note = bicyclic nucleic acid (BNA)
  modified_base 9: mod_base = OTHER; note = bicyclic nucleic acid (BNA)
  modified_base 14: mod_base = OTHER; note = bicyclic nucleic acid (BNA)
  modified_base 19..20: mod_base = OTHER; note = bicyclic nucleic acid (BNA)
  modified_base 2: mod_base = OTHER; note = 5-methyl
  modified_base 14: mod_base = OTHER; note = 5-methyl
  modified_base 19: mod_base = OTHER; note = 5-methyl
  source 1..20: mol_type = other DNA
  modified_base 11: mod_base = OTHER; note = Uracil
  modified_base 16: mod_base = OTHER; note = Uracil
  modified_base 17: mod_base = OTHER; note = Uracil
  modified_base 18: mod_base = OTHER; note = Uracil
tcaaggaagatggcatttct

SEQ ID NO: 15574 - DNA, 20 bp, synthetic construct
  misc_feature 1..20: note = Description of Artificial Sequence: Synthetic Antisense oligonucleotide
  misc_feature 1..20: note = Original Sequence: tcaaggaagauggcauuuct
  modified_base 1..2: mod_base = OTHER; note = bicyclic nucleic acid (BNA)
  modified_base 5: mod_base = OTHER; note = bicyclic nucleic acid (BNA)
  modified_base 9: mod_base = OTHER; note = bicyclic nucleic acid (BNA)
  modified_base 19..20: mod_base = OTHER; note = bicyclic nucleic acid (BNA)
  modified_base 2: mod_base = OTHER; note = 5-methyl
  modified_base 14: mod_base = OTHER; note = 5-methyl
  modified_base 19: mod_base = OTHER; note = 5-methyl
  source 1..20: mol_type = other DNA
  modified_base 11: mod_base = OTHER; note = Uracil
  modified_base 16: mod_base = OTHER; note = Uracil
  modified_base 17: mod_base = OTHER; note = Uracil
  modified_base 18: mod_base = OTHER; note = Uracil
tcaaggaagatggcatttct

SEQ ID NO: 15575 - DNA, 20 bp, synthetic construct
  misc_feature 1..20: note = Description of Artificial Sequence: Synthetic Antisense oligonucleotide
  misc_feature 1..20: note = Original Sequence: tcaaggaagauggcauuuct
  modified_base 1..2: mod_base = OTHER; note = bicyclic nucleic acid (BNA)
  modified_base 6: mod_base = OTHER; note = bicyclic nucleic acid (BNA)
  modified_base 14: mod_base = OTHER; note = bicyclic nucleic acid (BNA)
  modified_base 19..20: mod_base = OTHER; note = bicyclic nucleic acid (BNA)
  modified_base 2: mod_base = OTHER; note = 5-methyl
  modified_base 14: mod_base = OTHER; note = 5-methyl
  modified_base 19: mod_base = OTHER; note = 5-methyl
  source 1..20: mol_type = other DNA
  modified_base 11: mod_base = OTHER; note = Uracil
  modified_base 16: mod_base = OTHER; note = Uracil
  modified_base 17: mod_base = OTHER; note = Uracil
  modified_base 18: mod_base = OTHER; note = Uracil
tcaaggaagatggcatttct

SEQ ID NO: 15576 - DNA, 20 bp, synthetic construct
  misc_feature 1..20: note = Description of Artificial Sequence: Synthetic Antisense oligonucleotide
  misc_feature 1..20: note = Original Sequence: tcaaggaagauggcauuuct
  modified_base 1..2: mod_base = OTHER; note = bicyclic nucleic acid (BNA)
  modified_base 5: mod_base = OTHER; note = bicyclic nucleic acid (BNA)
  modified_base 13: mod_base = OTHER; note = bicyclic nucleic acid (BNA)
  modified_base 19..20: mod_base = OTHER; note = bicyclic nucleic acid (BNA)
  modified_base 2: mod_base = OTHER; note = 5-methyl
  modified_base 14: mod_base = OTHER; note = 5-methyl
  modified_base 19: mod_base = OTHER; note = 5-methyl
  source 1..20: mol_type = other DNA
  modified_base 11: mod_base = OTHER; note = Uracil
  modified_base 16: mod_base = OTHER; note = Uracil
  modified_base 17: mod_base = OTHER; note = Uracil
  modified_base 18: mod_base = OTHER; note = Uracil
tcaaggaagatggcatttct

SEQ ID NO: 15577 - DNA, 20 bp, synthetic construct
  misc_feature 1..20: note = Description of Artificial Sequence: Synthetic Antisense oligonucleotide
  misc_feature 1..20: note = Original Sequence: tcaaggaagauggcauuuct
  modified_base 1..2: mod_base = OTHER; note = bicyclic nucleic acid (BNA)
  modified_base 6: mod_base = OTHER; note = bicyclic nucleic acid (BNA)
  modified_base 9: mod_base = OTHER; note = bicyclic nucleic acid (BNA)
  modified_base 19..20: mod_base = OTHER; note = bicyclic nucleic acid (BNA)
  modified_base 2: mod_base = OTHER; note = 5-methyl
  modified_base 14: mod_base = OTHER; note = 5-methyl
  modified_base 19: mod_base = OTHER; note = 5-methyl
  source 1..20: mol_type = other DNA
  modified_base 11: mod_base = OTHER; note = Uracil
  modified_base 16: mod_base = OTHER; note = Uracil
  modified_base 17: mod_base = OTHER; note = Uracil
  modified_base 18: mod_base = OTHER; note = Uracil
tcaaggaagatggcatttct

SEQ ID NO: 15578 - DNA, 20 bp, synthetic construct
  misc_feature 1..20: note = Description of Artificial Sequence: Synthetic Antisense oligonucleotide
  misc_feature 1..20: note = Original Sequence: tcaaggaagauggcauuuct
  modified_base 1..2: mod_base = OTHER; note = bicyclic nucleic acid (BNA)
  modified_base 13..14: mod_base = OTHER; note = bicyclic nucleic acid (BNA)
  modified_base 19..20: mod_base = OTHER; note = bicyclic nucleic acid (BNA)
  modified_base 2: mod_base = OTHER; note = 5-methyl
  modified_base 14: mod_base = OTHER; note = 5-methyl
  modified_base 19: mod_base = OTHER; note = 5-methyl
  source 1..20: mol_type = other DNA
  modified_base 11: mod_base = OTHER; note = Uracil
  modified_base 16: mod_base = OTHER; note = Uracil
  modified_base 17: mod_base = OTHER; note = Uracil
  modified_base 18: mod_base = OTHER; note = Uracil
tcaaggaagatggcatttct

SEQ ID NO: 15579 - DNA, 20 bp, synthetic construct
  misc_feature 1..20: note = Description of Artificial Sequence: Synthetic Antisense oligonucleotide
  misc_feature 1..20: note = Original Sequence: tcaaggaagauggcauuuct
  modified_base 1..2: mod_base = OTHER; note = bicyclic nucleic acid (BNA)
  modified_base 6: mod_base = OTHER; note = bicyclic nucleic acid (BNA)
  modified_base 13: mod_base = OTHER; note = bicyclic nucleic acid (BNA)
  modified_base 19..20: mod_base = OTHER; note = bicyclic nucleic acid (BNA)
  modified_base 2: mod_base = OTHER; note = 5-methyl
  modified_base 14: mod_base = OTHER; note = 5-methyl
  modified_base 19: mod_base = OTHER; note = 5-methyl
  source 1..20: mol_type = other DNA
  modified_base 11: mod_base = OTHER; note = Uracil
  modified_base 16: mod_base = OTHER; note = Uracil
  modified_base 17: mod_base = OTHER; note = Uracil
  modified_base 18: mod_base = OTHER; note = Uracil
tcaaggaagatggcatttct

SEQ ID NO: 15580 - DNA, 20 bp, synthetic construct
  misc_feature 1..20: note = Description of Artificial Sequence: Synthetic Antisense oligonucleotide
  misc_feature 1..20: note = Original Sequence: tcaaggaagauggcauuuct
  modified_base 1..2: mod_base = OTHER; note = bicyclic nucleic acid (BNA)
  modified_base 5: mod_base = OTHER; note = bicyclic nucleic acid (BNA)
  modified_base 14: mod_base = OTHER; note = bicyclic nucleic acid (BNA)
  modified_base 19..20: mod_base = OTHER; note = bicyclic nucleic acid (BNA)
  modified_base 2: mod_base = OTHER; note = 5-methyl
  modified_base 14: mod_base = OTHER; note = 5-methyl
  modified_base 19: mod_base = OTHER; note = 5-methyl
  source 1..20: mol_type = other DNA
  modified_base 11: mod_base = OTHER; note = Uracil
  modified_base 16: mod_base = OTHER; note = Uracil
  modified_base 17: mod_base = OTHER; note = Uracil
  modified_base 18: mod_base = OTHER; note = Uracil
tcaaggaagatggcatttct

SEQ ID NO: 15581 - DNA, 20 bp, synthetic construct
  misc_feature 1..20: note = Description of Artificial Sequence: Synthetic Antisense oligonucleotide
  misc_feature 1..20: note = Original Sequence: tcaaggaagauggcauuuct
  modified_base 1..2: mod_base = OTHER; note = bicyclic nucleic acid (BNA)
  modified_base 12: mod_base = OTHER; note = bicyclic nucleic acid (BNA)
  modified_base 14: mod_base = OTHER; note = bicyclic nucleic acid (BNA)
  modified_base 19..20: mod_base = OTHER; note = bicyclic nucleic acid (BNA)
  modified_base 2: mod_base = OTHER; note = 5-methyl
  modified_base 14: mod_base = OTHER; note = 5-methyl
  modified_base 19: mod_base = OTHER; note = 5-methyl
  source 1..20: mol_type = other DNA
  modified_base 11: mod_base = OTHER; note = Uracil
  modified_base 16: mod_base = OTHER; note = Uracil
  modified_base 17: mod_base = OTHER; note = Uracil
  modified_base 18: mod_base = OTHER; note = Uracil
tcaaggaagatggcatttct

SEQ ID NO: 15582 - DNA, 20 bp, synthetic construct
  misc_feature 1..20: note = Description of Artificial Sequence: Synthetic Antisense oligonucleotide
  misc_feature 1..20: note = Original Sequence: tcaaggaagauggcauuuct
  modified_base 1..2: mod_base = OTHER; note = bicyclic nucleic acid (BNA)
  modified_base 6: mod_base = OTHER; note = bicyclic nucleic acid (BNA)
  modified_base 12: mod_base = OTHER; note = bicyclic nucleic acid (BNA)
  modified_base 19..20: mod_base = OTHER; note = bicyclic nucleic acid (BNA)
  modified_base 2: mod_base = OTHER; note = 5-methyl
  modified_base 14: mod_base = OTHER; note = 5-methyl
  modified_base 19: mod_base = OTHER; note = 5-methyl
  source 1..20: mol_type = other DNA
  modified_base 11: mod_base = OTHER; note = Uracil
  modified_base 16: mod_base = OTHER; note = Uracil
  modified_base 17: mod_base = OTHER; note = Uracil
  modified_base 18: mod_base = OTHER; note = Uracil
tcaaggaagatggcatttct

SEQ ID NO: 15583 - DNA, 20 bp, synthetic construct
  misc_feature 1..20: note = Description of Artificial Sequence: Synthetic Antisense oligonucleotide
  misc_feature 1..20: note = Original Sequence: tcaaggaagauggcauuuct
  modified_base 1..2: mod_base = OTHER; note = bicyclic nucleic acid (BNA)
  modified_base 5..6: mod_base = OTHER; note = bicyclic nucleic acid (BNA)
  modified_base 19..20: mod_base = OTHER; note = bicyclic nucleic acid (BNA)
  modified_base 2: mod_base = OTHER; note = 5-methyl
  modified_base 14: mod_base = OTHER; note = 5-methyl
  modified_base 19: mod_base = OTHER; note = 5-methyl
  source 1..20: mol_type = other DNA
  modified_base 11: mod_base = OTHER; note = Uracil
  modified_base 16: mod_base = OTHER; note = Uracil
  modified_base 17: mod_base = OTHER; note = Uracil
  modified_base 18: mod_base = OTHER; note = Uracil
tcaaggaagatggcatttct

SEQ ID NO: 15584 - DNA, 20 bp, synthetic construct
  misc_feature 1..20: note = Description of Artificial Sequence: Synthetic Antisense oligonucleotide
  misc_feature 1..20: note = Original Sequence: tcaaggaagauggcauuuct
  modified_base 1..2: mod_base = OTHER; note = bicyclic nucleic acid (BNA)
  modified_base 9: mod_base = OTHER; note = bicyclic nucleic acid (BNA)
  modified_base 12: mod_base = OTHER; note = bicyclic nucleic acid (BNA)
  modified_base 19..20: mod_base = OTHER; note = bicyclic nucleic acid (BNA)
  modified_base 2: mod_base = OTHER; note = 5-methyl
  modified_base 14: mod_base = OTHER; note = 5-methyl
  modified_base 19: mod_base = OTHER; note = 5-methyl
  source 1..20: mol_type = other DNA
  modified_base 11: mod_base = OTHER; note = Uracil
  modified_base 16: mod_base = OTHER; note = Uracil
  modified_base 17: mod_base = OTHER; note = Uracil
  modified_base 18: mod_base = OTHER; note = Uracil
tcaaggaagatggcatttct

SEQ ID NO: 15585 - DNA, 20 bp, synthetic construct
  misc_feature 1..20: note = Description of Artificial Sequence: Synthetic Antisense oligonucleotide
  misc_feature 1..20: note = Original Sequence: tcaaggaagauggcauuuct
  modified_base 1..2: mod_base = OTHER; note = bicyclic nucleic acid (BNA)
  modified_base 12..13: mod_base = OTHER; note = bicyclic nucleic acid (BNA)
  modified_base 19..20: mod_base = OTHER; note = bicyclic nucleic acid (BNA)
  modified_base 2: mod_base = OTHER; note = 5-methyl
  modified_base 14: mod_base = OTHER; note = 5-methyl
  modified_base 19: mod_base = OTHER; note = 5-methyl
  source 1..20: mol_type = other DNA
  modified_base 11: mod_base = OTHER; note = Uracil
  modified_base 16: mod_base = OTHER; note = Uracil
  modified_base 17: mod_base = OTHER; note = Uracil
  modified_base 18: mod_base = OTHER; note = Uracil
tcaaggaagatggcatttct

SEQ ID NO: 15586 - DNA, 20 bp, synthetic construct
  misc_feature 1..20: note = Description of Artificial Sequence: Synthetic Antisense oligonucleotide
  misc_feature 1..20: note = Original Sequence: tcaaggaagauggcauuuct
  modified_base 1..2: mod_base = OTHER; note = bicyclic nucleic acid (BNA)
  modified_base 5: mod_base = OTHER; note = bicyclic nucleic acid (BNA)
  modified_base 12: mod_base = OTHER; note = bicyclic nucleic acid (BNA)
  modified_base 19..20: mod_base = OTHER; note = bicyclic nucleic acid (BNA)
  modified_base 2: mod_base = OTHER; note = 5-methyl
  modified_base 14: mod_base = OTHER; note = 5-methyl
  modified_base 19: mod_base = OTHER; note = 5-methyl
  source 1..20: mol_type = other DNA
  modified_base 11: mod_base = OTHER; note = Uracil
  modified_base 16: mod_base = OTHER; note = Uracil
  modified_base 17: mod_base = OTHER; note = Uracil
  modified_base 18: mod_base = OTHER; note = Uracil
tcaaggaagatggcatttct

SEQ ID NO: 15587 - DNA, 20 bp, synthetic construct
  misc_feature 1..20: note = Description of Artificial Sequence: Synthetic Antisense oligonucleotide
  misc_feature 1..20: note = Original Sequence: tcaaggaagauggcauuuct
  modified_base 1..2: mod_base = OTHER; note = bicyclic nucleic acid (BNA)
  modified_base 9: mod_base = OTHER; note = bicyclic nucleic acid (BNA)
  modified_base 13: mod_base = OTHER; note = bicyclic nucleic acid (BNA)
  modified_base 19..20: mod_base = OTHER; note = bicyclic nucleic acid (BNA)
  modified_base 2: mod_base = OTHER; note = 5-methyl
  modified_base 14: mod_base = OTHER; note = 5-methyl
  modified_base 19: mod_base = OTHER; note = 5-methyl
  source 1..20: mol_type = other DNA
  modified_base 11: mod_base = OTHER; note = Uracil
  modified_base 16: mod_base = OTHER; note = Uracil
  modified_base 17: mod_base = OTHER; note = Uracil
  modified_base 18: mod_base = OTHER; note = Uracil
tcaaggaagatggcatttct

SEQ ID NO: 15588 - DNA, 22 bp, synthetic construct
  misc_feature 1..22: note = Description of Artificial Sequence: Synthetic Antisense oligonucleotide
  misc_feature 1..22: note = Original Sequence: tcaaggaagauggcauuucuag
  modified_base 1..2: mod_base = OTHER; note = bicyclic nucleic acid (BNA)
  modified_base 9: mod_base = OTHER; note = bicyclic nucleic acid (BNA)
  modified_base 14: mod_base = OTHER; note = bicyclic nucleic acid (BNA)
  modified_base 21..22: mod_base = OTHER; note = bicyclic nucleic acid (BNA)
  modified_base 2: mod_base = OTHER; note = 5-methyl
  modified_base 14: mod_base = OTHER; note = 5-methyl
  modified_base 19: mod_base = OTHER; note = 5-methyl
  source 1..22: mol_type = other DNA
  modified_base 11: mod_base = OTHER; note = Uracil
  modified_base 16: mod_base = OTHER; note = Uracil
  modified_base 17: mod_base = OTHER; note = Uracil
  modified_base 18: mod_base = OTHER; note = Uracil
  modified_base 20: mod_base = OTHER; note = Uracil
tcaaggaagatggcatttctag

SEQ ID NO: 15589 - DNA, 22 bp, synthetic construct
  misc_feature 1..22: note = Description of Artificial Sequence: Synthetic Antisense oligonucleotide
  misc_feature 1..22: note = Original Sequence: tcaaggaagauggcauuucuag
  modified_base 1..2: mod_base = OTHER; note = bicyclic nucleic acid (BNA)
  modified_base 5: mod_base = OTHER; note = bicyclic nucleic acid (BNA)
  modified_base 9: mod_base = OTHER; note = bicyclic nucleic acid (BNA)
  modified_base 21..22: mod_base = OTHER; note = bicyclic nucleic acid (BNA)
  modified_base 2: mod_base = OTHER; note = 5-methyl
  modified_base 14: mod_base = OTHER; note = 5-methyl
  modified_base 19: mod_base = OTHER; note = 5-methyl
  source 1..22: mol_type = other DNA
  modified_base 11: mod_base = OTHER; note = Uracil
  modified_base 16: mod_base = OTHER; note = Uracil
  modified_base 17: mod_base = OTHER; note = Uracil
  modified_base 18: mod_base = OTHER; note = Uracil
  modified_base 20: mod_base = OTHER; note = Uracil
tcaaggaagatggcatttctag

SEQ ID NO: 15590 - DNA, 22 bp, synthetic construct
  misc_feature 1..22: note = Description of Artificial Sequence: Synthetic Antisense oligonucleotide
  misc_feature 1..22: note = Original Sequence: tcaaggaagauggcauuucuag
  modified_base 1..2: mod_base = OTHER; note = bicyclic nucleic acid (BNA)
  modified_base 5: mod_base = OTHER; note = bicyclic nucleic acid (BNA)
  modified_base 19: mod_base = OTHER; note = bicyclic nucleic acid (BNA)
  modified_base 21..22: mod_base = OTHER; note = bicyclic nucleic acid (BNA)
  modified_base 2: mod_base = OTHER; note = 5-methyl
  modified_base 14: mod_base = OTHER; note = 5-methyl
  modified_base 19: mod_base = OTHER; note = 5-methyl
  source 1..22: mol_type = other DNA
  modified_base 11: mod_base = OTHER; note = Uracil
  modified_base 16: mod_base = OTHER; note = Uracil
  modified_base 17: mod_base = OTHER; note = Uracil
  modified_base 18: mod_base = OTHER; note = Uracil
  modified_base 20: mod_base = OTHER; note = Uracil
tcaaggaagatggcatttctag

SEQ ID NO: 15591 - DNA, 22 bp, synthetic construct
  misc_feature 1..22: note = Description of Artificial Sequence: Synthetic Antisense oligonucleotide
  misc_feature 1..22: note = Original Sequence: tcaaggaagauggcauuucuag
  modified_base 1..2: mod_base = OTHER; note = bicyclic nucleic acid (BNA)
  modified_base 6: mod_base = OTHER; note = bicyclic nucleic acid (BNA)
  modified_base 14: mod_base = OTHER; note = bicyclic nucleic acid (BNA)
  modified_base 21..22: mod_base = OTHER; note = bicyclic nucleic acid (BNA)
  modified_base 2: mod_base = OTHER; note = 5-methyl
  modified_base 14: mod_base = OTHER; note = 5-methyl
  modified_base 19: mod_base = OTHER; note = 5-methyl
  source 1..22: mol_type = other DNA
  modified_base 11: mod_base = OTHER; note = Uracil
  modified_base 16: mod_base = OTHER; note = Uracil
  modified_base 17: mod_base = OTHER; note = Uracil
  modified_base 18: mod_base = OTHER; note = Uracil
  modified_base 20: mod_base = OTHER; note = Uracil
tcaaggaagatggcatttctag

SEQ ID NO: 15592 - DNA, 22 bp, synthetic construct
  misc_feature 1..22: note = Description of Artificial Sequence: Synthetic Antisense oligonucleotide
  misc_feature 1..22: note = Original Sequence: tcaaggaagauggcauuucuag
  modified_base 1..2: mod_base = OTHER; note = bicyclic nucleic acid (BNA)
  modified_base 5: mod_base = OTHER; note = bicyclic nucleic acid (BNA)
  modified_base 13: mod_base = OTHER; note = bicyclic nucleic acid (BNA)
  modified_base 21..22: mod_base = OTHER; note = bicyclic nucleic acid (BNA)
  modified_base 2: mod_base = OTHER; note = 5-methyl
  modified_base 14: mod_base = OTHER; note = 5-methyl
  modified_base 19: mod_base = OTHER; note = 5-methyl
  source 1..22: mol_type = other DNA
  modified_base 11: mod_base = OTHER; note = Uracil
  modified_base 16: mod_base = OTHER; note = Uracil
  modified_base 17: mod_base = OTHER; note = Uracil
  modified_base 18: mod_base = OTHER; note = Uracil
  modified_base 20: mod_base = OTHER; note = Uracil
tcaaggaagatggcatttctag

SEQ ID NO: 15593 - DNA, 22 bp, synthetic construct
  misc_feature 1..22: note = Description of Artificial Sequence: Synthetic Antisense oligonucleotide
  misc_feature 1..22: note = Original Sequence: tcaaggaagauggcauuucuag
  modified_base 1..2: mod_base = OTHER; note = bicyclic nucleic acid (BNA)
  modified_base 6: mod_base = OTHER; note = bicyclic nucleic acid (BNA)
  modified_base 9: mod_base = OTHER; note = bicyclic nucleic acid (BNA)
  modified_base 21..22: mod_base = OTHER; note = bicyclic nucleic acid (BNA)
  modified_base 2: mod_base = OTHER; note = 5-methyl
  modified_base 14: mod_base = OTHER; note = 5-methyl
  modified_base 19: mod_base = OTHER; note = 5-methyl
  source 1..22: mol_type = other DNA
  modified_base 11: mod_base = OTHER; note = Uracil
  modified_base 16: mod_base = OTHER; note = Uracil
  modified_base 17: mod_base = OTHER; note = Uracil
  modified_base 18: mod_base = OTHER; note = Uracil
  modified_base 20: mod_base = OTHER; note = Uracil
tcaaggaagatggcatttctag

SEQ ID NO: 15594 - DNA, 22 bp, synthetic construct
  misc_feature 1..22: note = Description of Artificial Sequence: Synthetic Antisense oligonucleotide
  misc_feature 1..22: note = Original Sequence: tcaaggaagauggcauuucuag
  modified_base 1..2: mod_base = OTHER; note = bicyclic nucleic acid (BNA)
  modified_base 13..14: mod_base = OTHER; note = bicyclic nucleic acid (BNA)
  modified_base 21..22: mod_base = OTHER; note = bicyclic nucleic acid (BNA)
  modified_base 2: mod_base = OTHER; note = 5-methyl
  modified_base 14: mod_base = OTHER; note = 5-methyl
  modified_base 19: mod_base = OTHER; note = 5-methyl
  source 1..22: mol_type = other DNA
  modified_base 11: mod_base = OTHER; note = Uracil
  modified_base 16: mod_base = OTHER; note = Uracil
  modified_base 17: mod_base = OTHER; note = Uracil
  modified_base 18: mod_base = OTHER; note = Uracil
  modified_base 20: mod_base = OTHER; note = Uracil
tcaaggaagatggcatttctag

SEQ ID NO: 15595 - DNA, 22 bp, synthetic construct
  misc_feature 1..22: note = Description of Artificial Sequence: Synthetic Antisense oligonucleotide
  misc_feature 1..22: note = Original Sequence: tcaaggaagauggcauuucuag
  modified_base 1..2: mod_base = OTHER; note = bicyclic nucleic acid (BNA)
  modified_base 6: mod_base = OTHER; note = bicyclic nucleic acid (BNA)
  modified_base 13: mod_base = OTHER; note = bicyclic nucleic acid (BNA)
  modified_base 21..22: mod_base = OTHER; note = bicyclic nucleic acid (BNA)
  modified_base 2: mod_base = OTHER; note = 5-methyl
  modified_base 14: mod_base = OTHER; note = 5-methyl
  modified_base 19: mod_base = OTHER; note = 5-methyl
  source 1..22: mol_type = other DNA
  modified_base 11: mod_base = OTHER; note = Uracil
  modified_base 16: mod_base = OTHER; note = Uracil
  modified_base 17: mod_base = OTHER; note = Uracil
  modified_base 18: mod_base = OTHER; note = Uracil
  modified_base 20: mod_base = OTHER; note = Uracil
tcaaggaagatggcatttctag

SEQ ID NO: 15596 - DNA, 22 bp, synthetic construct
  misc_feature 1..22: note = Description of Artificial Sequence: Synthetic Antisense oligonucleotide
  misc_feature 1..22: note = Original Sequence: tcaaggaagauggcauuucuag
  modified_base 1..2: mod_base = OTHER; note = bicyclic nucleic acid (BNA)
  modified_base 6: mod_base = OTHER; note = bicyclic nucleic acid (BNA)
  modified_base 19: mod_base = OTHER; note = bicyclic nucleic acid (BNA)
  modified_base 21..22: mod_base = OTHER; note = bicyclic nucleic acid (BNA)
  modified_base 2: mod_base = OTHER; note = 5-methyl
  modified_base 14: mod_base = OTHER; note = 5-methyl
  modified_base 19: mod_base = OTHER; note = 5-methyl
  source 1..22: mol_type = other DNA
  modified_base 11: mod_base = OTHER; note = Uracil
  modified_base 16: mod_base = OTHER; note = Uracil
  modified_base 17: mod_base = OTHER; note = Uracil
  modified_base 18: mod_base = OTHER; note = Uracil
  modified_base 20: mod_base = OTHER; note = Uracil
tcaaggaagatggcatttctag

SEQ ID NO: 15597 - DNA, 22 bp, synthetic construct
  misc_feature 1..22: note = Description of Artificial Sequence: Synthetic Antisense oligonucleotide
  misc_feature 1..22: note = Original Sequence: tcaaggaagauggcauuucuag
  modified_base 1..2: mod_base = OTHER; note = bicyclic nucleic acid (BNA)
  modified_base 5: mod_base = OTHER; note = bicyclic nucleic acid (BNA)
  modified_base 14: mod_base = OTHER; note = bicyclic nucleic acid (BNA)
  modified_base 21..22: mod_base = OTHER; note = bicyclic nucleic acid (BNA)
  modified_base 2: mod_base = OTHER; note = 5-methyl
  modified_base 14: mod_base = OTHER; note = 5-methyl
  modified_base 19: mod_base = OTHER; note = 5-methyl
  source 1..22: mol_type = other DNA
  modified_base 11: mod_base = OTHER; note = Uracil
  modified_base 16: mod_base = OTHER; note = Uracil
  modified_base 17: mod_base = OTHER; note = Uracil
  modified_base 18: mod_base = OTHER; note = Uracil
  modified_base 20: mod_base = OTHER; note = Uracil
tcaaggaagatggcatttctag

SEQ ID NO: 15598 - DNA, 22 bp, synthetic construct
  misc_feature 1..22: note = Description of Artificial Sequence: Synthetic Antisense oligonucleotide
  misc_feature 1..22: note = Original Sequence: tcaaggaagauggcauuucuag
  modified_base 1..2: mod_base = OTHER; note = bicyclic nucleic acid (BNA)
  modified_base 12: mod_base = OTHER; note = bicyclic nucleic acid (BNA)
  modified_base 19: mod_base = OTHER; note = bicyclic nucleic acid (BNA)
  modified_base 21..22: mod_base = OTHER; note = bicyclic nucleic acid (BNA)
  modified_base 2: mod_base = OTHER; note = 5-methyl
  modified_base 14: mod_base = OTHER; note = 5-methyl
  modified_base 19: mod_base = OTHER; note = 5-methyl
  source 1..22: mol_type = other DNA
  modified_base 11: mod_base = OTHER; note = Uracil
  modified_base 16: mod_base = OTHER; note = Uracil
  modified_base 17: mod_base = OTHER; note = Uracil
  modified_base 18: mod_base = OTHER; note = Uracil
  modified_base 20: mod_base = OTHER; note = Uracil
tcaaggaagatggcatttctag

SEQ ID NO: 15599 - DNA, 22 bp, synthetic construct
  misc_feature 1..22: note = Description of Artificial Sequence: Synthetic Antisense oligonucleotide
  misc_feature 1..22: note = Original Sequence: tcaaggaagauggcauuucuag
  modified_base 1..2: mod_base = OTHER; note = bicyclic nucleic acid (BNA)
  modified_base 12: mod_base = OTHER; note = bicyclic nucleic acid (BNA)
  modified_base 14: mod_base = OTHER; note = bicyclic nucleic acid (BNA)
  modified_base 21..22: mod_base = OTHER; note = bicyclic nucleic acid (BNA)
  modified_base 2: mod_base = OTHER; note = 5-methyl
  modified_base 14: mod_base = OTHER; note = 5-methyl
  modified_base 19: mod_base = OTHER; note = 5-methyl
  source 1..22: mol_type = other DNA
  modified_base 11: mod_base = OTHER; note = Uracil
  modified_base 16: mod_base = OTHER; note = Uracil
  modified_base 17: mod_base = OTHER; note = Uracil
  modified_base 18: mod_base = OTHER; note = Uracil
  modified_base 20: mod_base = OTHER; note = Uracil
tcaaggaagatggcatttctag

SEQ ID NO: 15600 - DNA, 22 bp, synthetic construct
  misc_feature 1..22: note = Description of Artificial Sequence: Synthetic Antisense oligonucleotide
  misc_feature 1..22: note = Original Sequence: tcaaggaagauggcauuucuag
  modified_base 1..2: mod_base = OTHER; note = bicyclic nucleic acid (BNA)
  modified_base 6: mod_base = OTHER; note = bicyclic nucleic acid (BNA)
  modified_base 12: mod_base = OTHER; note = bicyclic nucleic acid (BNA)
  modified_base 21..22: mod_base = OTHER; note = bicyclic nucleic acid (BNA)
  modified_base 2: mod_base = OTHER; note = 5-methyl
  modified_base 14: mod_base = OTHER; note = 5-methyl
  modified_base 19: mod_base = OTHER; note = 5-methyl
  source 1..22: mol_type = other DNA
  modified_base 11: mod_base = OTHER; note = Uracil
  modified_base 16: mod_base = OTHER; note = Uracil
  modified_base 17: mod_base = OTHER; note = Uracil
  modified_base 18: mod_base = OTHER; note = Uracil
  modified_base 20: mod_base = OTHER; note = Uracil
tcaaggaagatggcatttctag

SEQ ID NO: 15601 - DNA, 22 bp, synthetic construct
  misc_feature 1..22: note = Description of Artificial Sequence: Synthetic Antisense oligonucleotide
  misc_feature 1..22: note = Original Sequence: tcaaggaagauggcauuucuag
  modified_base 1..2: mod_base = OTHER; note = bicyclic nucleic acid (BNA)
  modified_base 5..6: mod_base = OTHER; note = bicyclic nucleic acid (BNA)
  modified_base 21..22: mod_base = OTHER; note = bicyclic nucleic acid (BNA)
  modified_base 2: mod_base = OTHER; note = 5-methyl
  modified_base 14: mod_base = OTHER; note = 5-methyl
  modified_base 19: mod_base = OTHER; note = 5-methyl
  source 1..22: mol_type = other DNA
  modified_base 11: mod_base = OTHER; note = Uracil
  modified_base 16: mod_base = OTHER; note = Uracil
  modified_base 17: mod_base = OTHER; note = Uracil
  modified_base 18: mod_base = OTHER; note = Uracil
  modified_base 20: mod_base = OTHER; note = Uracil
tcaaggaagatggcatttctag

SEQ ID NO: 15602 - DNA, 22 bp, synthetic construct
  misc_feature 1..22: note = Description of Artificial Sequence: Synthetic Antisense oligonucleotide
  misc_feature 1..22: note = Original Sequence: tcaaggaagauggcauuucuag
  modified_base 1..2: mod_base = OTHER; note = bicyclic nucleic acid (BNA)
  modified_base 9: mod_base = OTHER; note = bicyclic nucleic acid (BNA)
  modified_base 12: mod_base = OTHER; note = bicyclic nucleic acid (BNA)
  modified_base 21..22: mod_base = OTHER; note = bicyclic nucleic acid (BNA)
  modified_base 2: mod_base = OTHER; note = 5-methyl
  modified_base 14: mod_base = OTHER; note = 5-methyl
  modified_base 19: mod_base = OTHER; note = 5-methyl
  source 1..22: mol_type = other DNA
  modified_base 11: mod_base = OTHER; note = Uracil
  modified_base 16: mod_base = OTHER; note = Uracil
  modified_base 17: mod_base = OTHER; note = Uracil
  modified_base 18: mod_base = OTHER; note = Uracil
  modified_base 20: mod_base = OTHER; note = Uracil
tcaaggaagatggcatttctag

SEQ ID NO: 15603 - DNA, 22 bp, synthetic construct
  misc_feature 1..22: note = Description of Artificial Sequence: Synthetic Antisense oligonucleotide
  misc_feature 1..22: note = Original Sequence: tcaaggaagauggcauuucuag
  modified_base 1..2: mod_base = OTHER; note = bicyclic nucleic acid (BNA)
  modified_base 13: mod_base = OTHER; note = bicyclic nucleic acid (BNA)
  modified_base 19: mod_base = OTHER; note = bicyclic nucleic acid (BNA)
  modified_base 21..22: mod_base = OTHER; note = bicyclic nucleic acid (BNA)
  modified_base 2: mod_base = OTHER; note = 5-methyl
  modified_base 14: mod_base = OTHER; note = 5-methyl
  modified_base 19: mod_base = OTHER; note = 5-methyl
  source 1..22: mol_type = other DNA
  modified_base 11: mod_base = OTHER; note = Uracil
  modified_base 16: mod_base = OTHER; note = Uracil
  modified_base 17: mod_base = OTHER; note = Uracil
  modified_base 18: mod_base = OTHER; note = Uracil
  modified_base 20: mod_base = OTHER; note = Uracil
tcaaggaagatggcatttctag

SEQ ID NO: 15604 - DNA, 22 bp, synthetic construct
  misc_feature 1..22: note = Description of Artificial Sequence: Synthetic Antisense oligonucleotide
  misc_feature 1..22: note = Original Sequence: tcaaggaagauggcauuucuag
  modified_base 1..2: mod_base = OTHER; note = bicyclic nucleic acid (BNA)
  modified_base 12..13: mod_base = OTHER; note = bicyclic nucleic acid (BNA)
  modified_base 21..22: mod_base = OTHER; note = bicyclic nucleic acid (BNA)
  modified_base 2: mod_base = OTHER; note = 5-methyl
  modified_base 14: mod_base = OTHER; note = 5-methyl
  modified_base 19: mod_base = OTHER; note = 5-methyl
  source 1..22: mol_type = other DNA
  modified_base 11: mod_base = OTHER; note = Uracil
  modified_base 16: mod_base = OTHER; note = Uracil
  modified_base 17: mod_base = OTHER; note = Uracil
  modified_base 18: mod_base = OTHER; note = Uracil
  modified_base 20: mod_base = OTHER; note = Uracil
tcaaggaagatggcatttctag

SEQ ID NO: 15605 - DNA, 22 bp, synthetic construct
  misc_feature 1..22: note = Description of Artificial Sequence: Synthetic Antisense oligonucleotide
  misc_feature 1..22: note = Original Sequence: tcaaggaagauggcauuucuag
  modified_base 1..2: mod_base = OTHER; note = bicyclic nucleic acid (BNA)
  modified_base 5: mod_base = OTHER; note = bicyclic nucleic acid (BNA)
  modified_base 12: mod_base = OTHER; note = bicyclic nucleic acid (BNA)
  modified_base 21..22: mod_base = OTHER; note = bicyclic nucleic acid (BNA)
  modified_base 2: mod_base = OTHER; note = 5-methyl
  modified_base 14: mod_base = OTHER; note = 5-methyl
  modified_base 19: mod_base = OTHER; note = 5-methyl
  source 1..22: mol_type = other DNA
  modified_base 11: mod_base = OTHER; note = Uracil
  modified_base 16: mod_base = OTHER; note = Uracil
  modified_base 17: mod_base = OTHER; note = Uracil
  modified_base 18: mod_base = OTHER; note = Uracil
  modified_base 20: mod_base = OTHER; note = Uracil
tcaaggaagatggcatttctag

SEQ ID NO: 15606 - DNA, 22 bp, synthetic construct
  misc_feature 1..22: note = Description of Artificial Sequence: Synthetic Antisense oligonucleotide
  misc_feature 1..22: note = Original Sequence: tcaaggaagauggcauuucuag
  modified_base 1..2: mod_base = OTHER; note = bicyclic nucleic acid (BNA)
  modified_base 9: mod_base = OTHER; note = bicyclic nucleic acid (BNA)
  modified_base 13: mod_base = OTHER; note = bicyclic nucleic acid (BNA)
  modified_base 21..22: mod_base = OTHER; note = bicyclic nucleic acid (BNA)
  modified_base 2: mod_base = OTHER; note = 5-methyl
  modified_base 14: mod_base = OTHER; note = 5-methyl
  modified_base 19: mod_base = OTHER; note = 5-methyl
  source 1..22: mol_type = other DNA
  modified_base 11: mod_base = OTHER; note = Uracil
  modified_base 16: mod_base = OTHER; note = Uracil
  modified_base 17: mod_base = OTHER; note = Uracil
  modified_base 18: mod_base = OTHER; note = Uracil
  modified_base 20: mod_base = OTHER; note = Uracil
tcaaggaagatggcatttctag

SEQ ID NO: 15607 - DNA, 22 bp, synthetic construct
  misc_feature 1..22: note = Description of Artificial Sequence: Synthetic Antisense oligonucleotide
  misc_feature 1..22: note = Original Sequence: tcaaggaagauggcauuucuag
  modified_base 1..2: mod_base = OTHER; note = bicyclic nucleic acid (BNA)
  modified_base 14: mod_base = OTHER; note = bicyclic nucleic acid (BNA)
  modified_base 19: mod_base = OTHER; note = bicyclic nucleic acid (BNA)
  modified_base 21..22: mod_base = OTHER; note = bicyclic nucleic acid (BNA)
  modified_base 2: mod_base = OTHER; note = 5-methyl
  modified_base 14: mod_base = OTHER; note = 5-methyl
  modified_base 19: mod_base = OTHER; note = 5-methyl
  source 1..22: mol_type = other DNA
  modified_base 11: mod_base = OTHER; note = Uracil
  modified_base 16: mod_base = OTHER; note = Uracil
  modified_base 17: mod_base = OTHER; note = Uracil
  modified_base 18: mod_base = OTHER; note = Uracil
  modified_base 20: mod_base = OTHER; note = Uracil
tcaaggaagatggcatttctag

SEQ ID NO: 15608 - DNA, 22 bp, synthetic construct
  misc_feature 1..22: note = Description of Artificial Sequence: Synthetic Antisense oligonucleotide
  misc_feature 1..22: note = Original Sequence: tcaaggaagauggcauuucuag
  modified_base 1..2: mod_base = OTHER; note = bicyclic nucleic acid (BNA)
  modified_base 9: mod_base = OTHER; note = bicyclic nucleic acid (BNA)
  modified_base 19: mod_base = OTHER; note = bicyclic nucleic acid (BNA)
  modified_base 21..22: mod_base = OTHER; note = bicyclic nucleic acid (BNA)
  modified_base 2: mod_base = OTHER; note = 5-methyl
  modified_base 14: mod_base = OTHER; note = 5-methyl
  modified_base 19: mod_base = OTHER; note = 5-methyl
  source 1..22: mol_type = other DNA
  modified_base 11: mod_base = OTHER; note = Uracil
  modified_base 16: mod_base = OTHER; note = Uracil
  modified_base 17: mod_base = OTHER; note = Uracil
  modified_base 18: mod_base = OTHER; note = Uracil
  modified_base 20: mod_base = OTHER; note = Uracil
tcaaggaagatggcatttctag

SEQ ID NO: 15609 - DNA, 18 bp, synthetic construct
  misc_feature 1..18: note = Description of Artificial Sequence: Synthetic Antisense oligonucleotide
  modified_base 1..2: mod_base = OTHER; note = bicyclic nucleic acid (BNA)
  modified_base 9: mod_base = OTHER; note = bicyclic nucleic acid (BNA)
  modified_base 17..18: mod_base = OTHER; note = bicyclic nucleic acid (BNA)
  source 1..18: mol_type = other DNA
ggtaagttctgtccaagc

SEQ ID NO: 15610 - DNA, 18 bp, synthetic construct
  misc_feature 1..18: note = Description of Artificial Sequence: Synthetic Antisense oligonucleotide
  modified_base 1..2: mod_base = OTHER; note = bicyclic nucleic acid (BNA)
  modified_base 11: mod_base = OTHER; note = bicyclic nucleic acid (BNA)
  modified_base 17..18: mod_base = OTHER; note = bicyclic nucleic acid (BNA)
  source 1..18: mol_type = other DNA
ggtaagttctgtccaagc

SEQ ID NO: 15611 - DNA, 18 bp, synthetic construct
  misc_feature 1..18: note = Description of Artificial Sequence: Synthetic Antisense oligonucleotide
  modified_base 1..2: mod_base = OTHER; note = bicyclic nucleic acid (BNA)
  modified_base 6: mod_base = OTHER; note = bicyclic nucleic acid (BNA)
  modified_base 17..18: mod_base = OTHER; note = bicyclic nucleic acid (BNA)
  source 1..18: mol_type = other DNA
ggtaagttctgtccaagc

SEQ ID NO: 15612 - DNA, 18 bp, synthetic construct
  misc_feature 1..18: note = Description of Artificial Sequence: Synthetic Antisense oligonucleotide
  modified_base 1..2: mod_base = OTHER; note = bicyclic nucleic acid (BNA)
  modified_base 13: mod_base = OTHER; note = bicyclic nucleic acid (BNA)
  modified_base 17..18: mod_base = OTHER; note = bicyclic nucleic acid (BNA)
  source 1..18: mol_type = other DNA
ggtaagttctgtccaagc

SEQ ID NO: 15613 - DNA, 18 bp, synthetic construct
  misc_feature 1..18: note = Description of Artificial Sequence: Synthetic Antisense oligonucleotide
  modified_base 1..2: mod_base = OTHER; note = bicyclic nucleic acid (BNA)
  modified_base 14: mod_base = OTHER; note = bicyclic nucleic acid (BNA)
  modified_base 17..18: mod_base = OTHER; note = bicyclic nucleic acid (BNA)
  source 1..18: mol_type = other DNA
ggtaagttctgtccaagc

SEQ ID NO: 15614 - DNA, 18 bp, synthetic construct
  misc_feature 1..18: note = Description of Artificial Sequence: Synthetic Antisense oligonucleotide
  modified_base 1..2: mod_base = OTHER; note = bicyclic nucleic acid (BNA)
  modified_base 16..18: mod_base = OTHER; note = bicyclic nucleic acid (BNA)
  source 1..18: mol_type = other DNA
gtaagttctgtccaagcc

SEQ ID NO: 15615 - DNA, 18 bp, synthetic construct
  misc_feature 1..18: note = Description of Artificial Sequence: Synthetic Antisense oligonucleotide
  modified_base 1..2: mod_base = OTHER; note = bicyclic nucleic acid (BNA)
  modified_base 10: mod_base = OTHER; note = bicyclic nucleic acid (BNA)
  modified_base 17..18: mod_base = OTHER; note = bicyclic nucleic acid (BNA)
  source 1..18: mol_type = other DNA
gtaagttctgtccaagcc

SEQ ID NO: 15616 - DNA, 18 bp, synthetic construct
  misc_feature 1..18: note = Description of Artificial Sequence: Synthetic Antisense oligonucleotide
  modified_base 1..2: mod_base = OTHER; note = bicyclic nucleic acid (BNA)
  modified_base 5: mod_base = OTHER; note = bicyclic nucleic acid (BNA)
  modified_base 17..18: mod_base = OTHER; note = bicyclic nucleic acid (BNA)
  source 1..18: mol_type = other DNA
gtaagttctgtccaagcc

SEQ ID NO: 15617 - DNA, 18 bp, synthetic construct
  misc_feature 1..18: note = Description of Artificial Sequence: Synthetic Antisense oligonucleotide
  modified_base 1..2: mod_base = OTHER; note = bicyclic nucleic acid (BNA)
  modified_base 12: mod_base = OTHER; note = bicyclic nucleic acid (BNA)
  modified_base 17..18: mod_base = OTHER; note = bicyclic nucleic acid (BNA)
  source 1..18: mol_type = other DNA
gtaagttctgtccaagcc

SEQ ID NO: 15618 - DNA, 18 bp, synthetic construct
  misc_feature 1..18: note = Description of Artificial Sequence: Synthetic Antisense oligonucleotide
  modified_base 1..2: mod_base = OTHER; note = bicyclic nucleic acid (BNA)
  modified_base 13: mod_base = OTHER; note = bicyclic nucleic acid (BNA)
  modified_base 17..18: mod_base = OTHER; note = bicyclic nucleic acid (BNA)
  source 1..18: mol_type = other DNA
gtaagttctgtccaagcc

SEQ ID NO: 15619 - DNA, 18 bp, synthetic construct
  misc_feature 1..18: note = Description of Artificial Sequence: Synthetic Antisense oligonucleotide
  modified_base 1..2: mod_base = OTHER; note = bicyclic nucleic acid (BNA)
  modified_base 8: mod_base = OTHER; note = bicyclic nucleic acid (BNA)
  modified_base 17..18: mod_base = OTHER; note = bicyclic nucleic acid (BNA)
  source 1..18: mol_type = other DNA
gtaagttctgtccaagcc

SEQ ID NO: 15620 - DNA, 18 bp, synthetic construct
  misc_feature 1..18: note = Description of Artificial Sequence: Synthetic Antisense oligonucleotide
  modified_base 1..2: mod_base = OTHER; note = bicyclic nucleic acid (BNA)
  modified_base 4: mod_base = OTHER; note = bicyclic nucleic acid (BNA)
  modified_base 17..18: mod_base = OTHER; note = bicyclic nucleic acid (BNA)
  source 1..18: mol_type = other DNA
agtcggtaagttctgtcc

SEQ ID NO: 15621 - DNA, 18 bp, synthetic construct
  misc_feature 1..18: note = Description of Artificial Sequence: Synthetic Antisense oligonucleotide
  modified_base 1..2: mod_base = OTHER; note = bicyclic nucleic acid (BNA)
  modified_base 10: mod_base = OTHER; note = bicyclic nucleic acid (BNA)
  modified_base 17..18: mod_base = OTHER; note = bicyclic nucleic acid (BNA)
  source 1..18: mol_type = other DNA
agtcggtaagttctgtcc

SEQ ID NO: 15622 - DNA, 18 bp, synthetic construct
  misc_feature 1..18: note = Description of Artificial Sequence: Synthetic Antisense oligonucleotide
  modified_base 1..2: mod_base = OTHER; note = bicyclic nucleic acid (BNA)
  modified_base 5: mod_base = OTHER; note = bicyclic nucleic acid (BNA)
  modified_base 17..18: mod_base = OTHER; note = bicyclic nucleic acid (BNA)
  source 1..18: mol_type = other DNA
agtcggtaagttctgtcc

SEQ ID NO: 15623 - DNA, 18 bp, synthetic construct
  misc_feature 1..18: note = Description of Artificial Sequence: Synthetic Antisense oligonucleotide
  modified_base 1..2: mod_base = OTHER; note = bicyclic nucleic acid (BNA)
  modified_base 6: mod_base = OTHER; note = bicyclic nucleic acid (BNA)
  modified_base 17..18: mod_base = OTHER; note = bicyclic nucleic acid (BNA)
  source 1..18: mol_type = other DNA
agtcggtaagttctgtcc

SEQ ID NO: 15624 - DNA, 18 bp, synthetic construct
  misc_feature 1..18: note = Description of Artificial Sequence: Synthetic Antisense oligonucleotide
  modified_base 1..2: mod_base = OTHER; note = bicyclic nucleic acid (BNA)
  modified_base 13: mod_base = OTHER; note = bicyclic nucleic acid (BNA)
  modified_base 17..18: mod_base = OTHER; note = bicyclic nucleic acid (BNA)
  source 1..18: mol_type = other DNA
agtcggtaagttctgtcc

SEQ ID NO: 15625 - DNA, 18 bp, synthetic construct
  misc_feature 1..18: note = Description of Artificial Sequence: Synthetic Antisense oligonucleotide
  modified_base 1..2: mod_base = OTHER; note = bicyclic nucleic acid (BNA)
  modified_base 15: mod_base = OTHER; note = bicyclic nucleic acid (BNA)
  modified_base 17..18: mod_base = OTHER; note = bicyclic nucleic acid (BNA)
  source 1..18: mol_type = other DNA
agtcggtaagttctgtcc

SEQ ID NO: 15626 - DNA, 18 bp, synthetic construct
  misc_feature 1..18: note = Description of Artificial Sequence: Synthetic Antisense oligonucleotide
  modified_base 1..3: mod_base = OTHER; note = bicyclic nucleic acid (BNA)
  modified_base 17..18: mod_base = OTHER; note = bicyclic nucleic acid (BNA)
  source 1..18: mol_type = other DNA
ctgtccaagcccggttga

SEQ ID NO: 15627 - DNA, 18 bp, synthetic construct
  misc_feature 1..18: note = Description of Artificial Sequence: Synthetic Antisense oligonucleotide
  modified_base 1..2: mod_base = OTHER; note = bicyclic nucleic acid (BNA)
  modified_base 9: mod_base = OTHER; note = bicyclic nucleic acid (BNA)
  modified_base 17..18: mod_base = OTHER; note = bicyclic nucleic acid (BNA)
  source 1..18: mol_type = other DNA
ctgtccaagcccggttga

SEQ ID NO: 15628 - DNA, 18 bp, synthetic construct
  misc_feature 1..18: note = Description of Artificial Sequence: Synthetic Antisense oligonucleotide
  modified_base 1..2: mod_base = OTHER; note = bicyclic nucleic acid (BNA)
  modified_base 10: mod_base = OTHER; note = bicyclic nucleic acid (BNA)
  modified_base 17..18: mod_base = OTHER; note = bicyclic nucleic acid (BNA)
  source 1..18: mol_type = other DNA
ctgtccaagcccggttga

SEQ ID NO: 15629 - DNA, 18 bp, synthetic construct
  misc_feature 1..18: note = Description of Artificial Sequence: Synthetic Antisense oligonucleotide
  modified_base 1..2: mod_base = OTHER; note = bicyclic nucleic acid (BNA)
  modified_base 5: mod_base = OTHER; note = bicyclic nucleic acid (BNA)
  modified_base 17..18: mod_base = OTHER; note = bicyclic nucleic acid (BNA)
  source 1..18: mol_type = other DNA
ctgtccaagcccggttga

SEQ ID NO: 15630 - DNA, 18 bp, synthetic construct
  misc_feature 1..18: note = Description of Artificial Sequence: Synthetic Antisense oligonucleotide
  modified_base 1..2: mod_base = OTHER; note = bicyclic nucleic acid (BNA)
  modified_base 11: mod_base = OTHER; note = bicyclic nucleic acid (BNA)
  modified_base 17..18: mod_base = OTHER; note = bicyclic nucleic acid (BNA)
  source 1..18: mol_type = other DNA
ctgtccaagcccggttga

SEQ ID NO: 15631 - DNA, 18 bp, synthetic construct
  misc_feature 1..18: note = Description of Artificial Sequence: Synthetic Antisense oligonucleotide
  modified_base 1..2: mod_base = OTHER; note = bicyclic nucleic acid (BNA)
  modified_base 6: mod_base = OTHER; note = bicyclic nucleic acid (BNA)
  modified_base 17..18: mod_base = OTHER; note = bicyclic nucleic acid (BNA)
  source 1..18: mol_type = other DNA
ctgtccaagcccggttga

SEQ ID NO: 15632 - DNA, 18 bp, synthetic construct
  misc_feature 1..18: note = Description of Artificial Sequence: Synthetic Antisense oligonucleotide
  modified_base 1..2: mod_base = OTHER; note = bicyclic nucleic acid (BNA)
  modified_base 12: mod_base = OTHER; note = bicyclic nucleic acid (BNA)
  modified_base 17..18: mod_base = OTHER; note = bicyclic nucleic acid (BNA)
  source 1..18: mol_type = other DNA
ctgtccaagcccggttga

SEQ ID NO: 15633 - DNA, 18 bp, synthetic construct
  misc_feature 1..18: note = Description of Artificial Sequence: Synthetic Antisense oligonucleotide
  modified_base 1..2: mod_base = OTHER; note = bicyclic nucleic acid (BNA)
  modified_base 13: mod_base = OTHER; note = bicyclic nucleic acid (BNA)
  modified_base 17..18: mod_base = OTHER; note = bicyclic nucleic acid (BNA)
  source 1..18: mol_type = other DNA
ctgtccaagcccggttga

SEQ ID NO: 15634 - DNA, 18 bp, synthetic construct
  misc_feature 1..18: note = Description of Artificial Sequence: Synthetic Antisense oligonucleotide
  modified_base 1..2: mod_base = OTHER; note = bicyclic nucleic acid (BNA)
  modified_base 14: mod_base = OTHER; note = bicyclic nucleic acid (BNA)
  modified_base 17..18: mod_base = OTHER; note = bicyclic nucleic acid (BNA)
  source 1..18: mol_type = other DNA
ctgtccaagcccggttga

SEQ ID NO: 15635 - DNA, 18 bp, synthetic construct
  misc_feature 1..18: note = Description of Artificial Sequence: Synthetic Antisense oligonucleotide
  modified_base 1..2: mod_base = OTHER; note = bicyclic nucleic acid (BNA)
  modified_base 9: mod_base = OTHER; note = bicyclic nucleic acid (BNA)
  modified_base 14: mod_base = OTHER; note = bicyclic nucleic acid (BNA)
  modified_base 17..18: mod_base = OTHER; note = bicyclic nucleic acid (BNA)
  source 1..18: mol_type = other DNA
ggtaagttctgtccaagc

SEQ ID NO: 15636 - DNA, 18 bp, synthetic construct
  misc_feature 1..18: note = Description of Artificial Sequence: Synthetic Antisense oligonucleotide
  modified_base 1..2: mod_base = OTHER; note = bicyclic nucleic acid (BNA)
  modified_base 6: mod_base = OTHER; note = bicyclic nucleic acid (BNA)
  modified_base 14: mod_base = OTHER; note = bicyclic nucleic acid (BNA)
  modified_base 17..18: mod_base = OTHER; note = bicyclic nucleic acid (BNA)
  source 1..18: mol_type = other DNA
ggtaagttctgtccaagc

SEQ ID NO: 15637 - DNA, 18 bp, synthetic construct
  misc_feature 1..18: note = Description of Artificial Sequence: Synthetic Antisense oligonucleotide
  modified_base 1..2: mod_base = OTHER; note = bicyclic nucleic acid (BNA)
  modified_base 6: mod_base = OTHER; note = bicyclic nucleic acid (BNA)
  modified_base 9: mod_base = OTHER; note = bicyclic nucleic acid (BNA)
  modified_base 17..18: mod_base = OTHER; note = bicyclic nucleic acid (BNA)
  source 1..18: mol_type = other DNA
ggtaagttctgtccaagc

SEQ ID NO: 15638 - DNA, 18 bp, synthetic construct
  misc_feature 1..18: note = Description of Artificial Sequence: Synthetic Antisense oligonucleotide
  modified_base 1..2: mod_base = OTHER; note = bicyclic nucleic acid (BNA)
  modified_base 13..14: mod_base = OTHER; note = bicyclic nucleic acid (BNA)
  modified_base 17..18: mod_base = OTHER; note = bicyclic nucleic acid (BNA)
  source 1..18: mol_type = other DNA
ggtaagttctgtccaagc

SEQ ID NO: 15639 - DNA, 18 bp, synthetic construct
  misc_feature 1..18: note = Description of Artificial Sequence: Synthetic Antisense oligonucleotide
  modified_base 1..2: mod_base = OTHER; note = bicyclic nucleic acid (BNA)
  modified_base 6: mod_base = OTHER; note = bicyclic nucleic acid (BNA)
  modified_base 13: mod_base = OTHER; note = bicyclic nucleic acid (BNA)
  modified_base 17..18: mod_base = OTHER; note = bicyclic nucleic acid (BNA)
  source 1..18: mol_type = other DNA
ggtaagttctgtccaagc

SEQ ID NO: 15640 - DNA, 18 bp, synthetic construct
  misc_feature 1..18: note = Description of Artificial Sequence: Synthetic Antisense oligonucleotide
  modified_base 1..2: mod_base = OTHER; note = bicyclic nucleic acid (BNA)
  modified_base 9: mod_base = OTHER; note = bicyclic nucleic acid (BNA)
  modified_base 11: mod_base = OTHER; note = bicyclic nucleic acid (BNA)
  modified_base 17..18: mod_base = OTHER; note = bicyclic nucleic acid (BNA)
  source 1..18: mol_type = other DNA
ggtaagttctgtccaagc

SEQ ID NO: 15641 - DNA, 18 bp, synthetic construct
  misc_feature 1..18: note = Description of Artificial Sequence: Synthetic Antisense oligonucleotide
  modified_base 1..2: mod_base = OTHER; note = bicyclic nucleic acid (BNA)
  modified_base 11: mod_base = OTHER; note = bicyclic nucleic acid (BNA)
  modified_base 13: mod_base = OTHER; note = bicyclic nucleic acid (BNA)
  modified_base 17..18: mod_base = OTHER; note = bicyclic nucleic acid (BNA)
  source 1..18: mol_type = other DNA
ggtaagttctgtccaagc

SEQ ID NO: 15642 - DNA, 18 bp, synthetic construct
  misc_feature 1..18: note = Description of Artificial Sequence: Synthetic Antisense oligonucleotide
  modified_base 1..2: mod_base = OTHER; note = bicyclic nucleic acid (BNA)
  modified_base 11: mod_base = OTHER; note = bicyclic nucleic acid (BNA)
  modified_base 14: mod_base = OTHER; note = bicyclic nucleic acid (BNA)
  modified_base 17..18: mod_base = OTHER; note = bicyclic nucleic acid (BNA)
  source 1..18: mol_type = other DNA
ggtaagttctgtccaagc

SEQ ID NO: 15643 - DNA, 18 bp, synthetic construct
  misc_feature 1..18: note = Description of Artificial Sequence: Synthetic Antisense oligonucleotide
  modified_base 1..2: mod_base = OTHER; note = bicyclic nucleic acid (BNA)
  modified_base 6: mod_base = OTHER; note = bicyclic nucleic acid (BNA)
  modified_base 11: mod_base = OTHER; note = bicyclic nucleic acid (BNA)
  modified_base 17..18: mod_base = OTHER; note = bicyclic nucleic acid (BNA)
  source 1..18: mol_type = other DNA
ggtaagttctgtccaagc

SEQ ID NO: 15644 - DNA, 18 bp, synthetic construct
  misc_feature 1..18: note = Description of Artificial Sequence: Synthetic Antisense oligonucleotide
  modified_base 1..2: mod_base = OTHER; note = bicyclic nucleic acid (BNA)
  modified_base 9: mod_base = OTHER; note = bicyclic nucleic acid (BNA)
  modified_base 13: mod_base = OTHER; note = bicyclic nucleic acid (BNA)
  modified_base 17..18: mod_base = OTHER; note = bicyclic nucleic acid (BNA)
  source 1..18: mol_type = other DNA
ggtaagttctgtccaagc

SEQ ID NO: 15645 - DNA, 18 bp, synthetic construct
  misc_feature 1..18: note = Description of Artificial Sequence: Synthetic Antisense oligonucleotide
  modified_base 1..2: mod_base = OTHER; note = bicyclic nucleic acid (BNA)
  modified_base 5: mod_base = OTHER; note = bicyclic nucleic acid (BNA)
  modified_base 8: mod_base = OTHER; note = bicyclic nucleic acid (BNA)
  modified_base 17..18: mod_base = OTHER; note = bicyclic nucleic acid (BNA)
  source 1..18: mol_type = other DNA
gtaagttctgtccaagcc

SEQ ID NO: 15646 - DNA, 18 bp, synthetic construct
  misc_feature 1..18: note = Description of Artificial Sequence: Synthetic Antisense oligonucleotide
  modified_base 1..2: mod_base = OTHER; note = bicyclic nucleic acid (BNA)
  modified_base 8: mod_base = OTHER; note = bicyclic nucleic acid (BNA)
  modified_base 13: mod_base = OTHER; note = bicyclic nucleic acid (BNA)
  modified_base 17..18: mod_base = OTHER; note = bicyclic nucleic acid (BNA)
  source 1..18: mol_type = other DNA
gtaagttctgtccaagcc

SEQ ID NO: 15647 - DNA, 18 bp, synthetic construct
  misc_feature 1..18: note = Description of Artificial Sequence: Synthetic Antisense oligonucleotide
  modified_base 1..2: mod_base = OTHER; note = bicyclic nucleic acid (BNA)
  modified_base 5: mod_base = OTHER; note = bicyclic nucleic acid (BNA)
  modified_base 13: mod_base = OTHER; note = bicyclic nucleic acid (BNA)
  modified_base 17..18: mod_base = OTHER; note = bicyclic nucleic acid (BNA)
  source 1..18: mol_type = other DNA
gtaagttctgtccaagcc

SEQ ID NO: 15648 - DNA, 18 bp, synthetic construct
  misc_feature 1..18: note = Description of Artificial Sequence: Synthetic Antisense oligonucleotide
  modified_base 1..2: mod_base = OTHER; note = bicyclic nucleic acid (BNA)
  modified_base 8: mod_base = OTHER; note = bicyclic nucleic acid (BNA)
  modified_base 12: mod_base = OTHER; note = bicyclic nucleic acid (BNA)
  modified_base 17..18: mod_base = OTHER; note = bicyclic nucleic acid (BNA)
  source 1..18: mol_type = other DNA
gtaagttctgtccaagcc

SEQ ID NO: 15649 - DNA, 18 bp, synthetic construct
  misc_feature 1..18: note = Description of Artificial Sequence: Synthetic Antisense oligonucleotide
  modified_base 1..2: mod_base = OTHER; note = bicyclic nucleic acid (BNA)
  modified_base 5: mod_base = OTHER; note = bicyclic nucleic acid (BNA)
  modified_base 10: mod_base = OTHER; note = bicyclic nucleic acid (BNA)
  modified_base 17..18: mod_base = OTHER; note = bicyclic nucleic acid (BNA)
  source 1..18: mol_type = other DNA
gtaagttctgtccaagcc

SEQ ID NO: 15650 - DNA, 18 bp, synthetic construct
  misc_feature 1..18: note = Description of Artificial Sequence: Synthetic Antisense oligonucleotide
  modified_base 1..2: mod_base = OTHER; note = bicyclic nucleic acid (BNA)
  modified_base 8: mod_base = OTHER; note = bicyclic nucleic acid (BNA)
  modified_base 16..18: mod_base = OTHER; note = bicyclic nucleic acid (BNA)
  source 1..18: mol_type = other DNA
gtaagttctgtccaagcc

SEQ ID NO: 15651 - DNA, 18 bp, synthetic construct
  misc_feature 1..18: note = Description of Artificial Sequence: Synthetic Antisense oligonucleotide
  modified_base 1..2: mod_base = OTHER; note = bicyclic nucleic acid (BNA)
  modified_base 10: mod_base = OTHER; note = bicyclic nucleic acid (BNA)
  modified_base 16..18: mod_base = OTHER; note = bicyclic nucleic acid (BNA)
  source 1..18: mol_type = other DNA
gtaagttctgtccaagcc

SEQ ID NO: 15652 - DNA, 18 bp, synthetic construct
  misc_feature 1..18: note = Description of Artificial Sequence: Synthetic Antisense oligonucleotide
  modified_base 1..2: mod_base = OTHER; note = bicyclic nucleic acid (BNA)
  modified_base 10: mod_base = OTHER; note = bicyclic nucleic acid (BNA)
  modified_base 12: mod_base = OTHER; note = bicyclic nucleic acid (BNA)
  modified_base 17..18: mod_base = OTHER; note = bicyclic nucleic acid (BNA)
  source 1..18: mol_type = other DNA
gtaagttctgtccaagcc

SEQ ID NO: 15653 - DNA, 18 bp, synthetic construct
  misc_feature 1..18: note = Description of Artificial Sequence: Synthetic Antisense oligonucleotide
  modified_base 1..2: mod_base = OTHER; note = bicyclic nucleic acid (BNA)
  modified_base 12..13: mod_base = OTHER; note = bicyclic nucleic acid (BNA)
  modified_base 17..18: mod_base = OTHER; note = bicyclic nucleic acid (BNA)
  source 1..18: mol_type = other DNA
gtaagttctgtccaagcc

SEQ ID NO: 15654 - DNA, 18 bp, synthetic construct
  misc_feature 1..18: note = Description of Artificial Sequence: Synthetic Antisense oligonucleotide
  modified_base 1..2: mod_base = OTHER; note = bicyclic nucleic acid (BNA)
  modified_base 5: mod_base = OTHER; note = bicyclic nucleic acid (BNA)
  modified_base 12: mod_base = OTHER; note = bicyclic nucleic acid (BNA)
  modified_base 17..18: mod_base = OTHER; note = bicyclic nucleic acid (BNA)
  source 1..18: mol_type = other DNA
gtaagttctgtccaagcc

SEQ ID NO: 15655 - DNA, 18 bp, synthetic construct
  misc_feature 1..18: note = Description of Artificial Sequence: Synthetic Antisense oligonucleotide
  modified_base 1..2: mod_base = OTHER; note = bicyclic nucleic acid (BNA)
  modified_base 8: mod_base = OTHER; note = bicyclic nucleic acid (BNA)
  modified_base 10: mod_base = OTHER; note = bicyclic nucleic acid (BNA)
  modified_base 17..18: mod_base = OTHER; note = bicyclic nucleic acid (BNA)
  source 1..18: mol_type = other DNA
gtaagttctgtccaagcc

SEQ ID NO: 15656 - DNA, 18 bp, synthetic construct
  misc_feature 1..18: note = Description of Artificial Sequence: Synthetic Antisense oligonucleotide
  modified_base 1..2: mod_base = OTHER; note = bicyclic nucleic acid (BNA)
  modified_base 13: mod_base = OTHER; note = bicyclic nucleic acid (BNA)
  modified_base 16..18: mod_base = OTHER; note = bicyclic nucleic acid (BNA)
  source 1..18: mol_type = other DNA
gtaagttctgtccaagcc

SEQ ID NO: 15657 - DNA, 18 bp, synthetic construct
  misc_feature 1..18: note = Description of Artificial Sequence: Synthetic Antisense oligonucleotide
  modified_base 1..2: mod_base = OTHER; note = bicyclic nucleic acid (BNA)
  modified_base 5: mod_base = OTHER; note = bicyclic nucleic acid (BNA)
  modified_base 16..18: mod_base = OTHER; note = bicyclic nucleic acid (BNA)
  source 1..18: mol_type = other DNA
gtaagttctgtccaagcc

SEQ ID NO: 15658 - DNA, 18 bp, synthetic construct
  misc_feature 1..18: note = Description of Artificial Sequence: Synthetic Antisense oligonucleotide
  modified_base 1..2: mod_base = OTHER; note = bicyclic nucleic acid (BNA)
  modified_base 12: mod_base = OTHER; note = bicyclic nucleic acid (BNA)
  modified_base 16..18: mod_base = OTHER; note = bicyclic nucleic acid (BNA)
  source 1..18: mol_type = other DNA
gtaagttctgtccaagcc

SEQ ID NO: 15659 - DNA, 18 bp, synthetic construct
  misc_feature 1..18: note = Description of Artificial Sequence: Synthetic Antisense oligonucleotide
  modified_base 1..2: mod_base = OTHER; note = bicyclic nucleic acid (BNA)
  modified_base 10: mod_base = OTHER; note = bicyclic nucleic acid (BNA)
  modified_base 13: mod_base = OTHER; note = bicyclic nucleic acid (BNA)
  modified_base 17..18: mod_base = OTHER; note = bicyclic nucleic acid (BNA)
  source 1..18: mol_type = other DNA
gtaagttctgtccaagcc

SEQ ID NO: 15660 - DNA, 18 bp, synthetic construct
  misc_feature 1..18: note = Description of Artificial Sequence: Synthetic Antisense oligonucleotide
  modified_base 1..2: mod_base = OTHER; note = bicyclic nucleic acid (BNA)
  modified_base 6: mod_base = OTHER; note = bicyclic nucleic acid (BNA)
  modified_base 10: mod_base = OTHER; note = bicyclic nucleic acid (BNA)
  modified_base 17..18: mod_base = OTHER; note = bicyclic nucleic acid (BNA)
  source 1..18: mol_type = other DNA
agtcggtaagttctgtcc

SEQ ID NO: 15661 - DNA, 18 bp, synthetic construct
  misc_feature 1..18: note = Description of Artificial Sequence: Synthetic Antisense oligonucleotide
  modified_base 1..2: mod_base = OTHER; note = bicyclic nucleic acid (BNA)
  modified_base 5: mod_base = OTHER; note = bicyclic nucleic acid (BNA)
  modified_base 13: mod_base = OTHER; note = bicyclic nucleic acid (BNA)
  modified_base 17..18: mod_base = OTHER; note = bicyclic nucleic acid (BNA)
  source 1..18: mol_type = other DNA
agtcggtaagttctgtcc

SEQ ID NO: 15662 - DNA, 18 bp, synthetic construct
  misc_feature 1..18: note = Description of Artificial Sequence: Synthetic Antisense oligonucleotide
  modified_base 1..2: mod_base = OTHER; note = bicyclic nucleic acid (BNA)
  modified_base 4: mod_base = OTHER; note = bicyclic nucleic acid (BNA)
  modified_base 15: mod_base = OTHER; note = bicyclic nucleic acid (BNA)
  modified_base 17..18: mod_base = OTHER; note = bicyclic nucleic acid (BNA)
  source 1..18: mol_type = other DNA
agtcggtaagttctgtcc

SEQ ID NO: 15663 - DNA, 18 bp, synthetic construct
  misc_feature 1..18: note = Description of Artificial Sequence: Synthetic Antisense oligonucleotide
  modified_base 1..2: mod_base = OTHER; note = bicyclic nucleic acid (BNA)
  modified_base 5: mod_base = OTHER; note = bicyclic nucleic acid (BNA)
  modified_base 10: mod_base = OTHER; note = bicyclic nucleic acid (BNA)
  modified_base 17..18: mod_base = OTHER; note = bicyclic nucleic acid (BNA)
  source 1..18: mol_type = other DNA
agtcggtaagttctgtcc

SEQ ID NO: 15664 - DNA, 18 bp, synthetic construct
  misc_feature 1..18: note = Description of Artificial Sequence: Synthetic Antisense oligonucleotide
  modified_base 1..2: mod_base = OTHER; note = bicyclic nucleic acid (BNA)
  modified_base 6: mod_base = OTHER; note = bicyclic nucleic acid (BNA)
  modified_base 13: mod_base = OTHER; note = bicyclic nucleic acid (BNA)
  modified_base 17..18: mod_base = OTHER; note = bicyclic nucleic acid (BNA)
  source 1..18: mol_type = other DNA
agtcggtaagttctgtcc

SEQ ID NO: 15665 - DNA, 18 bp, synthetic construct
  misc_feature 1..18: note = Description of Artificial Sequence: Synthetic Antisense oligonucleotide
  modified_base 1..2: mod_base = OTHER; note = bicyclic nucleic acid (BNA)
  modified_base 10: mod_base = OTHER; note = bicyclic nucleic acid (BNA)
  modified_base 15: mod_base = OTHER; note = bicyclic nucleic acid (BNA)
  modified_base 17..18: mod_base = OTHER; note = bicyclic nucleic acid (BNA)
  source 1..18: mol_type = other DNA
agtcggtaagttctgtcc

SEQ ID NO: 15666 - DNA, 18 bp, synthetic construct
  misc_feature 1..18: note = Description of Artificial Sequence: Synthetic Antisense oligonucleotide
  modified_base 1..2: mod_base = OTHER; note = bicyclic nucleic acid (BNA)
  modified_base 13: mod_base = OTHER; note = bicyclic nucleic acid (BNA)
  modified_base 15: mod_base = OTHER; note = bicyclic nucleic acid (BNA)
  modified_base 17..18: mod_base = OTHER; note = bicyclic nucleic acid (BNA)
  source 1..18: mol_type = other DNA
agtcggtaagttctgtcc

SEQ ID NO: 15667 - DNA, 18 bp, synthetic construct
  misc_feature 1..18: note = Description of Artificial Sequence: Synthetic Antisense oligonucleotide
  modified_base 1..2: mod_base = OTHER; note = bicyclic nucleic acid (BNA)
  modified_base 5..6: mod_base = OTHER; note = bicyclic nucleic acid (BNA)
  modified_base 17..18: mod_base = OTHER; note = bicyclic nucleic acid (BNA)
  source 1..18: mol_type = other DNA
agtcggtaagttctgtcc

SEQ ID NO: 15668 - DNA, 18 bp, synthetic construct
  misc_feature 1..18: note = Description of Artificial Sequence: Synthetic Antisense oligonucleotide
  modified_base 1..2: mod_base = OTHER; note = bicyclic nucleic acid (BNA)
  modified_base 5: mod_base = OTHER; note = bicyclic nucleic acid (BNA)
  modified_base 15: mod_base = OTHER; note = bicyclic nucleic acid (BNA)
  modified_base 17..18: mod_base = OTHER; note = bicyclic nucleic acid (BNA)
  source 1..18: mol_type = other DNA
agtcggtaagttctgtcc

SEQ ID NO: 15669 - DNA, 18 bp, synthetic construct
  misc_feature 1..18: note = Description of Artificial Sequence: Synthetic Antisense oligonucleotide
  modified_base 1..2: mod_base = OTHER; note = bicyclic nucleic acid (BNA)
  modified_base 4: mod_base = OTHER; note = bicyclic nucleic acid (BNA)
  modified_base 10: mod_base = OTHER; note = bicyclic nucleic acid (BNA)
  modified_base 17..18: mod_base = OTHER; note = bicyclic nucleic acid (BNA)
  source 1..18: mol_type = other DNA
agtcggtaagttctgtcc

SEQ ID NO: 15670 - DNA, 18 bp, synthetic construct
  misc_feature 1..18: note = Description of Artificial Sequence: Synthetic Antisense oligonucleotide
  modified_base 1..2: mod_base = OTHER; note = bicyclic nucleic acid (BNA)
  modified_base 4: mod_base = OTHER; note = bicyclic nucleic acid (BNA)
  modified_base 6: mod_base = OTHER; note = bicyclic nucleic acid (BNA)
  modified_base 17..18: mod_base = OTHER; note = bicyclic nucleic acid (BNA)
  source 1..18: mol_type = other DNA
agtcggtaagttctgtcc

SEQ ID NO: 15671 - DNA, 18 bp, synthetic construct
  misc_feature 1..18: note = Description of Artificial Sequence: Synthetic Antisense oligonucleotide
  modified_base 1..2: mod_base = OTHER; note = bicyclic nucleic acid (BNA)
  modified_base 4: mod_base = OTHER; note = bicyclic nucleic acid (BNA)
  modified_base 13: mod_base = OTHER; note = bicyclic nucleic acid (BNA)
  modified_base 17..18: mod_base = OTHER; note = bicyclic nucleic acid (BNA)
  source 1..18: mol_type = other DNA
agtcggtaagttctgtcc

SEQ ID NO: 15672 - DNA, 18 bp, synthetic construct
  misc_feature 1..18: note = Description of Artificial Sequence: Synthetic Antisense oligonucleotide
  modified_base 1..2: mod_base = OTHER; note = bicyclic nucleic acid (BNA)
  modified_base 6: mod_base = OTHER; note = bicyclic nucleic acid (BNA)
  modified_base 15: mod_base = OTHER; note = bicyclic nucleic acid (BNA)
  modified_base 17..18: mod_base = OTHER; note = bicyclic nucleic acid (BNA)
  source 1..18: mol_type = other DNA
agtcggtaagttctgtcc

SEQ ID NO: 15673 - DNA, 18 bp, synthetic construct
  misc_feature 1..18: note = Description of Artificial Sequence: Synthetic Antisense oligonucleotide
  modified_base 1..2: mod_base = OTHER; note = bicyclic nucleic acid (BNA)
  modified_base 4..5: mod_base = OTHER; note = bicyclic nucleic acid (BNA)
  modified_base 17..18: mod_base = OTHER; note = bicyclic nucleic acid (BNA)
  source 1..18: mol_type = other DNA
agtcggtaagttctgtcc

SEQ ID NO: 15674 - DNA, 18 bp, synthetic construct
  misc_feature 1..18: note = Description of Artificial Sequence: Synthetic Antisense oligonucleotide
  modified_base 1..2: mod_base = OTHER; note = bicyclic nucleic acid (BNA)
  modified_base 10: mod_base = OTHER; note = bicyclic nucleic acid (BNA)
  modified_base 13: mod_base = OTHER; note = bicyclic nucleic acid (BNA)
  modified_base 17..18: mod_base = OTHER; note = bicyclic nucleic acid (BNA)
  source 1..18: mol_type = other DNA
agtcggtaagttctgtcc

SEQ ID NO: 15675 - DNA, 18 bp, synthetic construct
  misc_feature 1..18: note = Description of Artificial Sequence: Synthetic Antisense oligonucleotide
  modified_base 1..2: mod_base = OTHER; note = bicyclic nucleic acid (BNA)
  modified_base 6: mod_base = OTHER; note = bicyclic nucleic acid (BNA)
  modified_base 10: mod_base = OTHER; note = bicyclic nucleic acid (BNA)
  modified_base 17..18: mod_base = OTHER; note = bicyclic nucleic acid (BNA)
  source 1..18: mol_type = other DNA
ctgtccaagcccggttga

SEQ ID NO: 15676 - DNA, 18 bp, synthetic construct
  misc_feature 1..18: note = Description of Artificial Sequence: Synthetic Antisense oligonucleotide
  modified_base 1..2: mod_base = OTHER; note = bicyclic nucleic acid (BNA)
  modified_base 9: mod_base = OTHER; note = bicyclic nucleic acid (BNA)
  modified_base 14: mod_base = OTHER; note = bicyclic nucleic acid (BNA)
  modified_base 17..18: mod_base = OTHER; note = bicyclic nucleic acid (BNA)
  source 1..18: mol_type = other DNA
ctgtccaagcccggttga

SEQ ID NO: 15677 - DNA, 18 bp, synthetic construct
  misc_feature 1..18: note = Description of Artificial Sequence: Synthetic Antisense oligonucleotide
  modified_base 1..2: mod_base = OTHER; note = bicyclic nucleic acid (BNA)
  modified_base 11..12: mod_base = OTHER; note = bicyclic nucleic acid (BNA)
  modified_base 17..18: mod_base = OTHER; note = bicyclic nucleic acid (BNA)
  source 1..18: mol_type = other DNA
ctgtccaagcccggttga

SEQ ID NO: 15678 - DNA, 18 bp, synthetic construct
  misc_feature 1..18: note = Description of Artificial Sequence: Synthetic Antisense oligonucleotide
  modified_base 1..2: mod_base = OTHER; note = bicyclic nucleic acid (BNA)
  modified_base 5: mod_base = OTHER; note = bicyclic nucleic acid (BNA)
  modified_base 9: mod_base = OTHER; note = bicyclic nucleic acid (BNA)
  modified_base 17..18: mod_base = OTHER; note = bicyclic nucleic acid (BNA)
  source 1..18: mol_type = other DNA
ctgtccaagcccggttga

SEQ ID NO: 15679 - DNA, 18 bp, synthetic construct
  misc_feature 1..18: note = Description of Artificial Sequence: Synthetic Antisense oligonucleotide
  modified_base 1..3: mod_base = OTHER; note = bicyclic nucleic acid (BNA)
  modified_base 9: mod_base = OTHER; note = bicyclic nucleic acid (BNA)
  modified_base 17..18: mod_base = OTHER; note = bicyclic nucleic acid (BNA)
  source 1..18: mol_type = other DNA
ctgtccaagcccggttga

SEQ ID NO: 15680 - DNA, 18 bp, synthetic construct
  misc_feature 1..18: note = Description of Artificial Sequence: Synthetic Antisense oligonucleotide
  modified_base 1..2: mod_base = OTHER; note = bicyclic nucleic acid (BNA)
  modified_base 6: mod_base = OTHER; note = bicyclic nucleic acid (BNA)
  modified_base 14: mod_base = OTHER; note = bicyclic nucleic acid (BNA)
  modified_base 17..18: mod_base = OTHER; note = bicyclic nucleic acid (BNA)
  source 1..18: mol_type = other DNA
ctgtccaagcccggttga

SEQ ID NO: 15681 - DNA, 18 bp, synthetic construct
  misc_feature 1..18: note = Description of Artificial Sequence: Synthetic Antisense oligonucleotide
  modified_base 1..2: mod_base = OTHER; note = bicyclic nucleic acid (BNA)
  modified_base 9..10: mod_base = OTHER; note = bicyclic nucleic acid (BNA)
  modified_base 17..18: mod_base = OTHER; note = bicyclic nucleic acid (BNA)
  source 1..18: mol_type = other DNA
ctgtccaagcccggttga

SEQ ID NO: 15682 - DNA, 18 bp, synthetic construct
  misc_feature 1..18: note = Description of Artificial Sequence: Synthetic Antisense oligonucleotide
  modified_base 1..2: mod_base = OTHER; note = bicyclic nucleic acid (BNA)
  modified_base 5: mod_base = OTHER; note = bicyclic nucleic acid (BNA)
  modified_base 13: mod_base = OTHER; note = bicyclic nucleic acid (BNA)
  modified_base 17..18: mod_base = OTHER; note = bicyclic nucleic acid (BNA)
  source 1..18: mol_type = other DNA
ctgtccaagcccggttga

SEQ ID NO: 15683 - DNA, 18 bp, synthetic construct
  misc_feature 1..18: note = Description of Artificial Sequence: Synthetic Antisense oligonucleotide
  modified_base 1..3: mod_base = OTHER; note = bicyclic nucleic acid (BNA)
  modified_base 13: mod_base = OTHER; note = bicyclic nucleic acid (BNA)
  modified_base 17..18: mod_base = OTHER; note = bicyclic nucleic acid (BNA)
  source 1..18: mol_type = other DNA
ctgtccaagcccggttga

SEQ ID NO: 15684 - DNA, 18 bp, synthetic construct
  misc_feature 1..18: note = Description of Artificial Sequence: Synthetic Antisense oligonucleotide
  modified_base 1..3: mod_base = OTHER; note = bicyclic nucleic acid (BNA)
  modified_base 6: mod_base = OTHER; note = bicyclic nucleic acid (BNA)
  modified_base 17..18: mod_base = OTHER; note = bicyclic nucleic acid (BNA)
  source 1..18: mol_type = other DNA
ctgtccaagcccggttga

SEQ ID NO: 15685 - DNA, 18 bp, synthetic construct
  misc_feature 1..18: note = Description of Artificial Sequence: Synthetic Antisense oligonucleotide
  modified_base 1..2: mod_base = OTHER; note = bicyclic nucleic acid (BNA)
  modified_base 6: mod_base = OTHER; note = bicyclic nucleic acid (BNA)
  modified_base 9: mod_base = OTHER; note = bicyclic nucleic acid (BNA)
  modified_base 17..18: mod_base = OTHER; note = bicyclic nucleic acid (BNA)
  source 1..18: mol_type = other DNA
ctgtccaagcccggttga

SEQ ID NO: 15686 - DNA, 18 bp, synthetic construct
  misc_feature 1..18: note = Description of Artificial Sequence: Synthetic Antisense oligonucleotide
  modified_base 1..2: mod_base = OTHER; note = bicyclic nucleic acid (BNA)
  modified_base 5: mod_base = OTHER; note = bicyclic nucleic acid (BNA)
  modified_base 10: mod_base = OTHER; note = bicyclic nucleic acid (BNA)
  modified_base 17..18: mod_base = OTHER; note = bicyclic nucleic acid (BNA)
  source 1..18: mol_type = other DNA
ctgtccaagcccggttga

SEQ ID NO: 15687 - DNA, 18 bp, synthetic construct
  misc_feature 1..18: note = Description of Artificial Sequence: Synthetic Antisense oligonucleotide
  modified_base 1..3: mod_base = OTHER; note = bicyclic nucleic acid (BNA)
  modified_base 10: mod_base = OTHER; note = bicyclic nucleic acid (BNA)
  modified_base 17..18: mod_base = OTHER; note = bicyclic nucleic acid (BNA)
  source 1..18: mol_type = other DNA
ctgtccaagcccggttga

SEQ ID NO: 15688 - DNA, 18 bp, synthetic construct
  misc_feature 1..18: note = Description of Artificial Sequence: Synthetic Antisense oligonucleotide
  modified_base 1..2: mod_base = OTHER; note = bicyclic nucleic acid (BNA)
  modified_base 13..14: mod_base = OTHER; note = bicyclic nucleic acid (BNA)
  modified_base 17..18: mod_base = OTHER; note = bicyclic nucleic acid (BNA)
  source 1..18: mol_type = other DNA
ctgtccaagcccggttga

SEQ ID NO: 15689 - DNA, 18 bp, synthetic construct
  misc_feature 1..18: note = Description of Artificial Sequence: Synthetic Antisense oligonucleotide
  modified_base 1..2: mod_base = OTHER; note = bicyclic nucleic acid (BNA)
  modified_base 6: mod_base = OTHER; note = bicyclic nucleic acid (BNA)
  modified_base 13: mod_base = OTHER; note = bicyclic nucleic acid (BNA)
  modified_base 17..18: mod_base = OTHER; note = bicyclic nucleic acid (BNA)
  source 1..18: mol_type = other DNA
ctgtccaagcccggttga

SEQ ID NO: 15690 - DNA, 18 bp, synthetic construct
  misc_feature 1..18: note = Description of Artificial Sequence: Synthetic Antisense oligonucleotide
  modified_base 1..2: mod_base = OTHER; note = bicyclic nucleic acid (BNA)
  modified_base 9: mod_base = OTHER; note = bicyclic nucleic acid (BNA)
  modified_base 11: mod_base = OTHER; note = bicyclic nucleic acid (BNA)
  modified_base 17..18: mod_base = OTHER; note = bicyclic nucleic acid (BNA)
  source 1..18: mol_type = other DNA
ctgtccaagcccggttga

SEQ ID NO: 15691 - DNA, 18 bp, synthetic construct
  misc_feature 1..18: note = Description of Artificial Sequence: Synthetic Antisense oligonucleotide
  modified_base 1..2: mod_base = OTHER; note = bicyclic nucleic acid (BNA)
  modified_base 11: mod_base = OTHER; note = bicyclic nucleic acid (BNA)
  modified_base 13: mod_base = OTHER; note = bicyclic nucleic acid (BNA)
  modified_base 17..18: mod_base = OTHER; note = bicyclic nucleic acid (BNA)
  source 1..18: mol_type = other DNA
ctgtccaagcccggttga

SEQ ID NO: 15692 - DNA, 18 bp, synthetic construct
  misc_feature 1..18: note = Description of Artificial Sequence: Synthetic Antisense oligonucleotide
  modified_base 1..2: mod_base = OTHER; note = bicyclic nucleic acid (BNA)
  modified_base 5: mod_base = OTHER; note = bicyclic nucleic acid (BNA)
  modified_base 14: mod_base = OTHER; note = bicyclic nucleic acid (BNA)
  modified_base 17..18: mod_base = OTHER; note = bicyclic nucleic acid (BNA)
  source 1..18: mol_type = other DNA
ctgtccaagcccggttga

SEQ ID NO: 15693 - DNA, 18 bp, synthetic construct
  misc_feature 1..18: note = Description of Artificial Sequence: Synthetic Antisense oligonucleotide
  modified_base 1..3: mod_base = OTHER; note = bicyclic nucleic acid (BNA)
  modified_base 14: mod_base = OTHER; note = bicyclic nucleic acid (BNA)
  modified_base 17..18: mod_base = OTHER; note = bicyclic nucleic acid (BNA)
  source 1..18: mol_type = other DNA
ctgtccaagcccggttga

SEQ ID NO: 15694 - DNA, 18 bp, synthetic construct
  misc_feature 1..18: note = Description of Artificial Sequence: Synthetic Antisense oligonucleotide
  modified_base 1..2: mod_base = OTHER; note = bicyclic nucleic acid (BNA)
  modified_base 10: mod_base = OTHER; note = bicyclic nucleic acid (BNA)
  modified_base 12: mod_base = OTHER; note = bicyclic nucleic acid (BNA)
  modified_base 17..18: mod_base = OTHER; note = bicyclic nucleic acid (BNA)
  source 1..18: mol_type = other DNA
ctgtccaagcccggttga

SEQ ID NO: 15695 - DNA, 18 bp, synthetic construct
  misc_feature 1..18: note = Description of Artificial Sequence: Synthetic Antisense oligonucleotide
  modified_base 1..2: mod_base = OTHER; note = bicyclic nucleic acid (BNA)
  modified_base 12: mod_base = OTHER; note = bicyclic nucleic acid (BNA)
  modified_base 14: mod_base = OTHER; note = bicyclic nucleic acid (BNA)
  modified_base 17..18: mod_base = OTHER; note = bicyclic nucleic acid (BNA)
  source 1..18: mol_type = other DNA
ctgtccaagcccggttga

SEQ ID NO: 15696 - DNA, 18 bp, synthetic construct
  misc_feature 1..18: note = Description of Artificial Sequence: Synthetic Antisense oligonucleotide
  modified_base 1..2: mod_base = OTHER; note = bicyclic nucleic acid (BNA)
  modified_base 5: mod_base = OTHER; note = bicyclic nucleic acid (BNA)
  modified_base 11: mod_base = OTHER; note = bicyclic nucleic acid (BNA)
  modified_base 17..18: mod_base = OTHER; note = bicyclic nucleic acid (BNA)
  source 1..18: mol_type = other DNA
ctgtccaagcccggttga

SEQ ID NO: 15697 - DNA, 18 bp, synthetic construct
  misc_feature 1..18: note = Description of Artificial Sequence: Synthetic Antisense oligonucleotide
  modified_base 1..2: mod_base = OTHER; note = bicyclic nucleic acid (BNA)
  modified_base 6: mod_base = OTHER; note = bicyclic nucleic acid (BNA)
  modified_base 12: mod_base = OTHER; note = bicyclic nucleic acid (BNA)
  modified_base 17..18: mod_base = OTHER; note = bicyclic nucleic acid (BNA)
  source 1..18: mol_type = other DNA
ctgtccaagcccggttga

SEQ ID NO: 15698 - DNA, 18 bp, synthetic construct
  misc_feature 1..18: note = Description of Artificial Sequence: Synthetic Antisense oligonucleotide
  modified_base 1..2: mod_base = OTHER; note = bicyclic nucleic acid (BNA)
  modified_base 5..6: mod_base = OTHER; note = bicyclic nucleic acid (BNA)
  modified_base 17..18: mod_base = OTHER; note = bicyclic nucleic acid (BNA)
  source 1..18: mol_type = other DNA
ctgtccaagcccggttga

SEQ ID NO: 15699 - DNA, 18 bp, synthetic construct
  misc_feature 1..18: note = Description of Artificial Sequence: Synthetic Antisense oligonucleotide
  modified_base 1..2: mod_base = OTHER; note = bicyclic nucleic acid (BNA)
  modified_base 11: mod_base = OTHER; note = bicyclic nucleic acid (BNA)
  modified_base 14: mod_base = OTHER; note = bicyclic nucleic acid (BNA)
  modified_base 17..18: mod_base = OTHER; note = bicyclic nucleic acid (BNA)
  source 1..18: mol_type = other DNA
ctgtccaagcccggttga

SEQ ID NO: 15700 - DNA, 18 bp, synthetic construct
  misc_feature 1..18: note = Description of Artificial Sequence: Synthetic Antisense oligonucleotide
  modified_base 1..2: mod_base = OTHER; note = bicyclic nucleic acid (BNA)
  modified_base 9: mod_base = OTHER; note = bicyclic nucleic acid (BNA)
  modified_base 12: mod_base = OTHER; note = bicyclic nucleic acid (BNA)
  modified_base 17..18: mod_base = OTHER; note = bicyclic nucleic acid (BNA)
  source 1..18: mol_type = other DNA
ctgtccaagcccggttga

SEQ ID NO: 15701 - DNA, 18 bp, synthetic construct
  misc_feature 1..18: note = Description of Artificial Sequence: Synthetic Antisense oligonucleotide
  modified_base 1..3: mod_base = OTHER; note = bicyclic nucleic acid (BNA)
  modified_base 11: mod_base = OTHER; note = bicyclic nucleic acid (BNA)
  modified_base 17..18: mod_base = OTHER; note = bicyclic nucleic acid (BNA)
  source 1..18: mol_type = other DNA
ctgtccaagcccggttga

SEQ ID NO: 15702 - DNA, 18 bp, synthetic construct
  misc_feature 1..18: note = Description of Artificial Sequence: Synthetic Antisense oligonucleotide
  modified_base 1..2: mod_base = OTHER; note = bicyclic nucleic acid (BNA)
  modified_base 10..11: mod_base = OTHER; note = bicyclic nucleic acid (BNA)
  modified_base 17..18: mod_base = OTHER; note = bicyclic nucleic acid (BNA)
  source 1..18: mol_type = other DNA
ctgtccaagcccggttga

SEQ ID NO: 15703 - DNA, 18 bp, synthetic construct
  misc_feature 1..18: note = Description of Artificial Sequence: Synthetic Antisense oligonucleotide
  modified_base 1..2: mod_base = OTHER; note = bicyclic nucleic acid (BNA)
  modified_base 12..13: mod_base = OTHER; note = bicyclic nucleic acid (BNA)
  modified_base 17..18: mod_base = OTHER; note = bicyclic nucleic acid (BNA)
  source 1..18: mol_type = other DNA
ctgtccaagcccggttga

SEQ ID NO: 15704 - DNA, 18 bp, synthetic construct
  misc_feature 1..18: note = Description of Artificial Sequence: Synthetic Antisense oligonucleotide
  modified_base 1..2: mod_base = OTHER; note = bicyclic nucleic acid (BNA)
  modified_base 5: mod_base = OTHER; note = bicyclic nucleic acid (BNA)
  modified_base 12: mod_base = OTHER; note = bicyclic nucleic acid (BNA)
  modified_base 17..18: mod_base = OTHER; note = bicyclic nucleic acid (BNA)
  source 1..18: mol_type = other DNA
ctgtccaagcccggttga

SEQ ID NO: 15705 - DNA, 18 bp, synthetic construct
  misc_feature 1..18: note = Description of Artificial Sequence: Synthetic Antisense oligonucleotide
  modified_base 1..2: mod_base = OTHER; note = bicyclic nucleic acid (BNA)
  modified_base 10: mod_base = OTHER; note = bicyclic nucleic acid (BNA)
  modified_base 14: mod_base = OTHER; note = bicyclic nucleic acid (BNA)
  modified_base 17..18: mod_base = OTHER; note = bicyclic nucleic acid (BNA)
  source 1..18: mol_type = other DNA
ctgtccaagcccggttga

SEQ ID NO: 15706 - DNA, 18 bp, synthetic construct
  misc_feature 1..18: note = Description of Artificial Sequence: Synthetic Antisense oligonucleotide
  modified_base 1..2: mod_base = OTHER; note = bicyclic nucleic acid (BNA)
  modified_base 6: mod_base = OTHER; note = bicyclic nucleic acid (BNA)
  modified_base 11: mod_base = OTHER; note = bicyclic nucleic acid (BNA)
  modified_base 17..18: mod_base = OTHER; note = bicyclic nucleic acid (BNA)
  source 1..18: mol_type = other DNA
ctgtccaagcccggttga

SEQ ID NO: 15707 - DNA, 18 bp, synthetic construct
  misc_feature 1..18: note = Description of Artificial Sequence: Synthetic Antisense oligonucleotide
  modified_base 1..2: mod_base = OTHER; note = bicyclic nucleic acid (BNA)
  modified_base 9: mod_base = OTHER; note = bicyclic nucleic acid (BNA)
  modified_base 13: mod_base = OTHER; note = bicyclic nucleic acid (BNA)
  modified_base 17..18: mod_base = OTHER; note = bicyclic nucleic acid (BNA)
  source 1..18: mol_type = other DNA
ctgtccaagcccggttga

SEQ ID NO: 15708 - DNA, 18 bp, synthetic construct
  misc_feature 1..18: note = Description of Artificial Sequence: Synthetic Antisense oligonucleotide
  modified_base 1..3: mod_base = OTHER; note = bicyclic nucleic acid (BNA)
  modified_base 12: mod_base = OTHER; note = bicyclic nucleic acid (BNA)
  modified_base 17..18: mod_base = OTHER; note = bicyclic nucleic acid (BNA)
  source 1..18: mol_type = other DNA
ctgtccaagcccggttga

SEQ ID NO: 15709 - DNA, 18 bp, synthetic construct
  misc_feature 1..18: note = Description of Artificial Sequence: Synthetic Antisense oligonucleotide
  modified_base 1..3: mod_base = OTHER; note = bicyclic nucleic acid (BNA)
  modified_base 5: mod_base = OTHER; note = bicyclic nucleic acid (BNA)
  modified_base 17..18: mod_base = OTHER; note = bicyclic nucleic acid (BNA)
  source 1..18: mol_type = other DNA
ctgtccaagcccggttga

SEQ ID NO: 15710 - DNA, 18 bp, synthetic construct
  misc_feature 1..18: note = Description of Artificial Sequence: Synthetic Antisense oligonucleotide
  modified_base 1..2: mod_base = OTHER; note = bicyclic nucleic acid (BNA)
  modified_base 10: mod_base = OTHER; note = bicyclic nucleic acid (BNA)
  modified_base 13: mod_base = OTHER; note = bicyclic nucleic acid (BNA)
  modified_base 17..18: mod_base = OTHER; note = bicyclic nucleic acid (BNA)
  source 1..18: mol_type = other DNA
ctgtccaagcccggttga

SEQ ID NO: 15711 - DNA, 20 bp, synthetic construct
  misc_feature 1..20: note = Description of Artificial Sequence: Synthetic Antisense oligonucleotide
  modified_base 1..2: mod_base = OTHER; note = bicyclic nucleic acid (BNA)
  modified_base 9: mod_base = OTHER; note = bicyclic nucleic acid (BNA)
  modified_base 19..20: mod_base = OTHER; note = bicyclic nucleic acid (BNA)
  source 1..20: mol_type = other DNA
tcaaggaagatggcatttct

SEQ ID NO: 15712 - DNA, 20 bp, synthetic construct
  misc_feature 1..20: note = Description of Artificial Sequence: Synthetic Antisense oligonucleotide
  modified_base 1..2: mod_base = OTHER; note = bicyclic nucleic acid (BNA)
  modified_base 5: mod_base = OTHER; note = bicyclic nucleic acid (BNA)
  modified_base 19..20: mod_base = OTHER; note = bicyclic nucleic acid (BNA)
  source 1..20: mol_type = other DNA
tcaaggaagatggcatttct

SEQ ID NO: 15713 - DNA, 20 bp, synthetic construct
  misc_feature 1..20: note = Description of Artificial Sequence: Synthetic Antisense oligonucleotide
  modified_base 1..2: mod_base = OTHER; note = bicyclic nucleic acid (BNA)
  modified_base 6: mod_base = OTHER; note = bicyclic nucleic acid (BNA)
  modified_base 19..20: mod_base = OTHER; note = bicyclic nucleic acid (BNA)
  source 1..20: mol_type = other DNA
tcaaggaagatggcatttct

SEQ ID NO: 15714 - DNA, 20 bp, synthetic construct
  misc_feature 1..20: note = Description of Artificial Sequence: Synthetic Antisense oligonucleotide
  modified_base 1..2: mod_base = OTHER; note = bicyclic nucleic acid (BNA)
  modified_base 12: mod_base = OTHER; note = bicyclic nucleic acid (BNA)
  modified_base 19..20: mod_base = OTHER; note = bicyclic nucleic acid (BNA)
  source 1..20: mol_type = other DNA
tcaaggaagatggcatttct

SEQ ID NO: 15715 - DNA, 20 bp, synthetic construct
  misc_feature 1..20: note = Description of Artificial Sequence: Synthetic Antisense oligonucleotide
  modified_base 1..2: mod_base = OTHER; note = bicyclic nucleic acid (BNA)
  modified_base 13: mod_base = OTHER; note = bicyclic nucleic acid (BNA)
  modified_base 19..20: mod_base = OTHER; note = bicyclic nucleic acid (BNA)
  source 1..20: mol_type = other DNA
tcaaggaagatggcatttct

SEQ ID NO: 15716 - DNA, 20 bp, synthetic construct
  misc_feature 1..20: note = Description of Artificial Sequence: Synthetic Antisense oligonucleotide
  modified_base 1..2: mod_base = OTHER; note = bicyclic nucleic acid (BNA)
  modified_base 14: mod_base = OTHER; note = bicyclic nucleic acid (BNA)
  modified_base 19..20: mod_base = OTHER; note = bicyclic nucleic acid (BNA)
  source 1..20: mol_type = other DNA
tcaaggaagatggcatttct

SEQ ID NO: 15717 - DNA, 22 bp, synthetic construct
  misc_feature 1..22: note = Description of Artificial Sequence: Synthetic Antisense oligonucleotide
  modified_base 1..2: mod_base = OTHER; note = bicyclic nucleic acid (BNA)
  modified_base 9: mod_base = OTHER; note = bicyclic nucleic acid (BNA)
  modified_base 21..22: mod_base = OTHER; note = bicyclic nucleic acid (BNA)
  source 1..22: mol_type = other DNA
tcaaggaagatggcatttctag

SEQ ID NO: 15718 - DNA, 22 bp, synthetic construct
  misc_feature 1..22: note = Description of Artificial Sequence: Synthetic Antisense oligonucleotide
  modified_base 1..2: mod_base = OTHER; note = bicyclic nucleic acid (BNA)
  modified_base 5: mod_base = OTHER; note = bicyclic nucleic acid (BNA)
  modified_base 21..22: mod_base = OTHER; note = bicyclic nucleic acid (BNA)
  source 1..22: mol_type = other DNA
tcaaggaagatggcatttctag

SEQ ID NO: 15719 - DNA, 22 bp, synthetic construct
  misc_feature 1..22: note = Description of Artificial Sequence: Synthetic Antisense oligonucleotide
  modified_base 1..2: mod_base = OTHER; note = bicyclic nucleic acid (BNA)
  modified_base 6: mod_base = OTHER; note = bicyclic nucleic acid (BNA)
  modified_base 21..22: mod_base = OTHER; note = bicyclic nucleic acid (BNA)
  source 1..22: mol_type = other DNA
tcaaggaagatggcatttctag

SEQ ID NO: 15720 - DNA, 22 bp, synthetic construct
  misc_feature 1..22: note = Description of Artificial Sequence: Synthetic Antisense oligonucleotide
  modified_base 1..2: mod_base = OTHER; note = bicyclic nucleic acid (BNA)
  modified_base 12: mod_base = OTHER; note = bicyclic nucleic acid (BNA)
  modified_base 21..22: mod_base = OTHER; note = bicyclic nucleic acid (BNA)
  source 1..22: mol_type = other DNA
tcaaggaagatggcatttctag

SEQ ID NO: 15721 - DNA, 22 bp, synthetic construct
  misc_feature 1..22: note = Description of Artificial Sequence: Synthetic Antisense oligonucleotide
  modified_base 1..2: mod_base = OTHER; note = bicyclic nucleic acid (BNA)
  modified_base 13: mod_base = OTHER; note = bicyclic nucleic acid (BNA)
  modified_base 21..22: mod_base = OTHER; note = bicyclic nucleic acid (BNA)
  source 1..22: mol_type = other DNA
tcaaggaagatggcatttctag

SEQ ID NO: 15722 - DNA, 22 bp, synthetic construct
  misc_feature 1..22: note = Description of Artificial Sequence: Synthetic Antisense oligonucleotide
  modified_base 1..2: mod_base = OTHER; note = bicyclic nucleic acid (BNA)
  modified_base 19: mod_base = OTHER; note = bicyclic nucleic acid (BNA)
  modified_base 21..22: mod_base = OTHER; note = bicyclic nucleic acid (BNA)
  source 1..22: mol_type = other DNA
tcaaggaagatggcatttctag

SEQ ID NO: 15723 - DNA, 22 bp, synthetic construct
  misc_feature 1..22: note = Description of Artificial Sequence: Synthetic Antisense oligonucleotide
  modified_base 1..2: mod_base = OTHER; note = bicyclic nucleic acid (BNA)
  modified_base 14: mod_base = OTHER; note = bicyclic nucleic acid (BNA)
  modified_base 21..22: mod_base = OTHER; note = bicyclic nucleic acid (BNA)
  source 1..22: mol_type = other DNA
tcaaggaagatggcatttctag

SEQ ID NO: 15724 - DNA, 20 bp, synthetic construct
  misc_feature 1..20: note = Description of Artificial Sequence: Synthetic Antisense oligonucleotide
  modified_base 1..2: mod_base = OTHER; note = bicyclic nucleic acid (BNA)
  modified_base 9: mod_base = OTHER; note = bicyclic nucleic acid (BNA)
  modified_base 14: mod_base = OTHER; note = bicyclic nucleic acid (BNA)
  modified_base 19..20: mod_base = OTHER; note = bicyclic nucleic acid (BNA)
  source 1..20: mol_type = other DNA
tcaaggaagatggcatttct

SEQ ID NO: 15725 - DNA, 20 bp, synthetic construct
  misc_feature 1..20: note = Description of Artificial Sequence: Synthetic Antisense oligonucleotide
  modified_base 1..2: mod_base = OTHER; note = bicyclic nucleic acid (BNA)
  modified_base 5: mod_base = OTHER; note = bicyclic nucleic acid (BNA)
  modified_base 9: mod_base = OTHER; note = bicyclic nucleic acid (BNA)
  modified_base 19..20: mod_base = OTHER; note = bicyclic nucleic acid (BNA)
  source 1..20: mol_type = other DNA
tcaaggaagatggcatttct

SEQ ID NO: 15726 - DNA, 20 bp, synthetic construct
  misc_feature 1..20: note = Description of Artificial Sequence: Synthetic Antisense oligonucleotide
  modified_base 1..2: mod_base = OTHER; note = bicyclic nucleic acid (BNA)
  modified_base 6: mod_base = OTHER; note = bicyclic nucleic acid (BNA)
  modified_base 14: mod_base = OTHER; note = bicyclic nucleic acid (BNA)
  modified_base 19..20: mod_base = OTHER; note = bicyclic nucleic acid (BNA)
  source 1..20: mol_type = other DNA
tcaaggaagatggcatttct

SEQ ID NO: 15727 - DNA, 20 bp, synthetic construct
  misc_feature 1..20: note = Description of Artificial Sequence: Synthetic Antisense oligonucleotide
  modified_base 1..2: mod_base = OTHER; note = bicyclic nucleic acid (BNA)
  modified_base 5: mod_base = OTHER; note = bicyclic nucleic acid (BNA)
  modified_base 13: mod_base = OTHER; note = bicyclic nucleic acid (BNA)
  modified_base 19..20: mod_base = OTHER; note = bicyclic nucleic acid (BNA)
  source 1..20: mol_type = other DNA
tcaaggaagatggcatttct

SEQ ID NO: 15728 - DNA, 20 bp, synthetic construct
  misc_feature 1..20: note = Description of Artificial Sequence: Synthetic Antisense oligonucleotide
  modified_base 1..2: mod_base = OTHER; note = bicyclic nucleic acid (BNA)
  modified_base 6: mod_base = OTHER; note = bicyclic nucleic acid (BNA)
  modified_base 9: mod_base = OTHER; note = bicyclic nucleic acid (BNA)
  modified_base 19..20: mod_base = OTHER; note = bicyclic nucleic acid (BNA)
  source 1..20: mol_type = other DNA
tcaaggaagatggcatttct

SEQ ID NO: 15729 - DNA, 20 bp, synthetic construct
  misc_feature 1..20: note = Description of Artificial Sequence: Synthetic Antisense oligonucleotide
  modified_base 1..2: mod_base = OTHER; note = bicyclic nucleic acid (BNA)
  modified_base 13..14: mod_base = OTHER; note = bicyclic nucleic acid (BNA)
  modified_base 19..20: mod_base = OTHER; note = bicyclic nucleic acid (BNA)
  source 1..20: mol_type = other DNA
tcaaggaagatggcatttct

SEQ ID NO: 15730 - DNA, 20 bp, synthetic construct
  misc_feature 1..20: note = Description of Artificial Sequence: Synthetic Antisense oligonucleotide
  modified_base 1..2: mod_base = OTHER; note = bicyclic nucleic acid (BNA)
  modified_base 6: mod_base = OTHER; note = bicyclic nucleic acid (BNA)
  modified_base 13: mod_base = OTHER; note = bicyclic nucleic acid (BNA)
  modified_base 19..20: mod_base = OTHER; note = bicyclic nucleic acid (BNA)
  source 1..20: mol_type = other DNA
tcaaggaagatggcatttct

SEQ ID NO: 15731 - DNA, 20 bp, synthetic construct
  misc_feature 1..20: note = Description of Artificial Sequence: Synthetic Antisense oligonucleotide
  modified_base 1..2: mod_base = OTHER; note = bicyclic nucleic acid (BNA)
  modified_base 5: mod_base = OTHER; note = bicyclic nucleic acid (BNA)
  modified_base 14: mod_base = OTHER; note = bicyclic nucleic acid (BNA)
  modified_base 19..20: mod_base = OTHER; note = bicyclic nucleic acid (BNA)
  source 1..20: mol_type = other DNA
tcaaggaagatggcatttct

SEQ ID NO: 15732 - DNA, 20 bp, synthetic construct
  misc_feature 1..20: note = Description of Artificial Sequence: Synthetic Antisense oligonucleotide
  modified_base 1..2: mod_base = OTHER; note = bicyclic nucleic acid (BNA)
  modified_base 12: mod_base = OTHER; note = bicyclic nucleic acid (BNA)
  modified_base 14: mod_base = OTHER; note = bicyclic nucleic acid (BNA)
  modified_base 19..20: mod_base = OTHER; note = bicyclic nucleic acid (BNA)
  source 1..20: mol_type = other DNA
tcaaggaagatggcatttct

SEQ ID NO: 15733 - DNA, 20 bp, synthetic construct
  misc_feature 1..20: note = Description of Artificial Sequence: Synthetic Antisense oligonucleotide
  modified_base 1..2: mod_base = OTHER; note = bicyclic nucleic acid (BNA)
  modified_base 6: mod_base = OTHER; note = bicyclic nucleic acid (BNA)
  modified_base 12: mod_base = OTHER; note = bicyclic nucleic acid (BNA)
  modified_base 19..20: mod_base = OTHER; note = bicyclic nucleic acid (BNA)
  source 1..20: mol_type = other DNA
tcaaggaagatggcatttct

SEQ ID NO: 15734 - DNA, 20 bp, synthetic construct
  misc_feature 1..20: note = Description of Artificial Sequence: Synthetic Antisense oligonucleotide
  modified_base 1..2: mod_base = OTHER; note = bicyclic nucleic acid (BNA)
  modified_base 5..6: mod_base = OTHER; note = bicyclic nucleic acid (BNA)
  modified_base 19..20: mod_base = OTHER; note = bicyclic nucleic acid (BNA)
  source 1..20: mol_type = other DNA
tcaaggaagatggcatttct

SEQ ID NO: 15735 - DNA, 20 bp, synthetic construct
  misc_feature 1..20: note = Description of Artificial Sequence: Synthetic Antisense oligonucleotide
  modified_base 1..2: mod_base = OTHER; note = bicyclic nucleic acid (BNA)
  modified_base 9: mod_base = OTHER; note = bicyclic nucleic acid (BNA)
  modified_base 12: mod_base = OTHER; note = bicyclic nucleic acid (BNA)
  modified_base 19..20: mod_base = OTHER; note = bicyclic nucleic acid (BNA)
  source 1..20: mol_type = other DNA
tcaaggaagatggcatttct

SEQ ID NO: 15736 - DNA, 20 bp, synthetic construct
  misc_feature 1..20: note = Description of Artificial Sequence: Synthetic Antisense oligonucleotide
  modified_base 1..2: mod_base = OTHER; note = bicyclic nucleic acid (BNA)
  modified_base 12..13: mod_base = OTHER; note = bicyclic nucleic acid (BNA)
  modified_base 19..20: mod_base = OTHER; note = bicyclic nucleic acid (BNA)
  source 1..20: mol_type = other DNA
tcaaggaagatggcatttct

SEQ ID NO: 15737 - DNA, 20 bp, synthetic construct
  misc_feature 1..20: note = Description of Artificial Sequence: Synthetic Antisense oligonucleotide
  modified_base 1..2: mod_base = OTHER; note = bicyclic nucleic acid (BNA)
  modified_base 5: mod_base = OTHER; note = bicyclic nucleic acid (BNA)
  modified_base 12: mod_base = OTHER; note = bicyclic nucleic acid (BNA)
  modified_base 19..20: mod_base = OTHER; note = bicyclic nucleic acid (BNA)
  source 1..20: mol_type = other DNA
tcaaggaagatggcatttct

SEQ ID NO: 15738 - DNA, 20 bp, synthetic construct
  misc_feature 1..20: note = Description of Artificial Sequence: Synthetic Antisense oligonucleotide
  modified_base 1..2: mod_base = OTHER; note = bicyclic nucleic acid (BNA)
  modified_base 9: mod_base = OTHER; note = bicyclic nucleic acid (BNA)
  modified_base 13: mod_base = OTHER; note = bicyclic nucleic acid (BNA)
  modified_base 19..20: mod_base = OTHER; note = bicyclic nucleic acid (BNA)
  source 1..20: mol_type = other DNA
tcaaggaagatggcatttct

SEQ ID NO: 15739 - DNA, 22 bp, synthetic construct
  misc_feature 1..22: note = Description of Artificial Sequence: Synthetic Antisense oligonucleotide
  modified_base 1..2: mod_base = OTHER; note = bicyclic nucleic acid (BNA)
  modified_base 9: mod_base = OTHER; note = bicyclic nucleic acid (BNA)
  modified_base 14: mod_base = OTHER; note = bicyclic nucleic acid (BNA)
  modified_base 21..22: mod_base = OTHER; note = bicyclic nucleic acid (BNA)
  source 1..22: mol_type = other DNA
tcaaggaagatggcatttctag

SEQ ID NO: 15740 - DNA, 22 bp, synthetic construct
  misc_feature 1..22: note = Description of Artificial Sequence: Synthetic Antisense oligonucleotide
  modified_base 1..2: mod_base = OTHER; note = bicyclic nucleic acid (BNA)
  modified_base 5: mod_base = OTHER; note = bicyclic nucleic acid (BNA)
  modified_base 9: mod_base = OTHER; note = bicyclic nucleic acid (BNA)
  modified_base 21..22: mod_base = OTHER; note = bicyclic nucleic acid (BNA)
  source 1..22: mol_type = other DNA
tcaaggaagatggcatttctag

SEQ ID NO: 15741 - DNA, 22 bp, synthetic construct
  misc_feature 1..22: note = Description of Artificial Sequence: Synthetic Antisense oligonucleotide
  modified_base 1..2: mod_base = OTHER; note = bicyclic nucleic acid (BNA)
  modified_base 5: mod_base = OTHER; note = bicyclic nucleic acid (BNA)
  modified_base 19: mod_base = OTHER; note = bicyclic nucleic acid (BNA)
  modified_base 21..22: mod_base = OTHER; note = bicyclic nucleic acid (BNA)
  source 1..22: mol_type = other DNA
tcaaggaagatggcatttctag

SEQ ID NO: 15742 - DNA, 22 bp, synthetic construct
  misc_feature 1..22: note = Description of Artificial Sequence: Synthetic Antisense oligonucleotide
  modified_base 1..2: mod_base = OTHER; note = bicyclic nucleic acid (BNA)
  modified_base 6: mod_base = OTHER; note = bicyclic nucleic acid (BNA)
  modified_base 14: mod_base = OTHER; note = bicyclic nucleic acid (BNA)
  modified_base 21..22: mod_base = OTHER; note = bicyclic nucleic acid (BNA)
  source 1..22: mol_type = other DNA
tcaaggaagatggcatttctag

SEQ ID NO: 15743 - DNA, 22 bp, synthetic construct
  misc_feature 1..22: note = Description of Artificial Sequence: Synthetic Antisense oligonucleotide
  modified_base 1..2: mod_base = OTHER; note = bicyclic nucleic acid (BNA)
  modified_base 5: mod_base = OTHER; note = bicyclic nucleic acid (BNA)
  modified_base 13: mod_base = OTHER; note = bicyclic nucleic acid (BNA)
  modified_base 21..22: mod_base = OTHER; note = bicyclic nucleic acid (BNA)
  source 1..22: mol_type = other DNA
tcaaggaagatggcatttctag

SEQ ID NO: 15744 - DNA, 22 bp, synthetic construct
  misc_feature 1..22: note = Description of Artificial Sequence: Synthetic Antisense oligonucleotide
  modified_base 1..2: mod_base = OTHER; note = bicyclic nucleic acid (BNA)
  modified_base 6: mod_base = OTHER; note = bicyclic nucleic acid (BNA)
  modified_base 9: mod_base = OTHER; note = bicyclic nucleic acid (BNA)
  modified_base 21..22: mod_base = OTHER; note = bicyclic nucleic acid (BNA)
  source 1..22: mol_type = other DNA
tcaaggaagatggcatttctag

SEQ ID NO: 15745 - DNA, 22 bp, synthetic construct
  misc_feature 1..22: note = Description of Artificial Sequence: Synthetic Antisense oligonucleotide
  modified_base 1..2: mod_base = OTHER; note = bicyclic nucleic acid (BNA)
  modified_base 13..14: mod_base = OTHER; note = bicyclic nucleic acid (BNA)
  modified_base 21..22: mod_base = OTHER; note = bicyclic nucleic acid (BNA)
  source 1..22: mol_type = other DNA
tcaaggaagatggcatttctag

SEQ ID NO: 15746 - DNA, 22 bp, synthetic construct
  misc_feature 1..22: note = Description of Artificial Sequence: Synthetic Antisense oligonucleotide
  modified_base 1..2: mod_base = OTHER; note = bicyclic nucleic acid (BNA)
  modified_base 6: mod_base = OTHER; note = bicyclic nucleic acid (BNA)
  modified_base 13: mod_base = OTHER; note = bicyclic nucleic acid (BNA)
  modified_base 21..22: mod_base = OTHER; note = bicyclic nucleic acid (BNA)
  source 1..22: mol_type = other DNA
tcaaggaagatggcatttctag

SEQ ID NO: 15747 - DNA, 22 bp, synthetic construct
  misc_feature 1..22: note = Description of Artificial Sequence: Synthetic Antisense oligonucleotide
  modified_base 1..2: mod_base = OTHER; note = bicyclic nucleic acid (BNA)
  modified_base 6: mod_base = OTHER; note = bicyclic nucleic acid (BNA)
  modified_base 19: mod_base = OTHER; note = bicyclic nucleic acid (BNA)
  modified_base 21..22: mod_base = OTHER; note = bicyclic nucleic acid (BNA)
  source 1..22: mol_type = other DNA
tcaaggaagatggcatttctag

SEQ ID NO: 15748 - DNA, 22 bp, synthetic construct
  misc_feature 1..22: note = Description of Artificial Sequence: Synthetic Antisense oligonucleotide
  modified_base 1..2: mod_base = OTHER; note = bicyclic nucleic acid (BNA)
  modified_base 5: mod_base = OTHER; note = bicyclic nucleic acid (BNA)
  modified_base 14: mod_base = OTHER; note = bicyclic nucleic acid (BNA)
  modified_base 21..22: mod_base = OTHER; note = bicyclic nucleic acid (BNA)
  source 1..22: mol_type = other DNA
tcaaggaagatggcatttctag

SEQ ID NO: 15749 - DNA, 22 bp, synthetic construct
  misc_feature 1..22: note = Description of Artificial Sequence: Synthetic Antisense oligonucleotide
  modified_base 1..2: mod_base = OTHER; note = bicyclic nucleic acid (BNA)
  modified_base 12: mod_base = OTHER; note = bicyclic nucleic acid (BNA)
  modified_base 19: mod_base = OTHER; note = bicyclic nucleic acid (BNA)
  modified_base 21..22: mod_base = OTHER; note = bicyclic nucleic acid (BNA)
  source 1..22: mol_type = other DNA
tcaaggaagatggcatttctag

SEQ ID NO: 15750 - DNA, 22 bp, synthetic construct
  misc_feature 1..22: note = Description of Artificial Sequence: Synthetic Antisense oligonucleotide
  modified_base 1..2: mod_base = OTHER; note = bicyclic nucleic acid (BNA)
  modified_base 12: mod_base = OTHER; note = bicyclic nucleic acid (BNA)
  modified_base 14: mod_base = OTHER; note = bicyclic nucleic acid (BNA)
  modified_base 21..22: mod_base = OTHER; note = bicyclic nucleic acid (BNA)
  source 1..22: mol_type = other DNA
tcaaggaagatggcatttctag

SEQ ID NO: 15751 - DNA, 22 bp, synthetic construct
  misc_feature 1..22: note = Description of Artificial Sequence: Synthetic Antisense oligonucleotide
  modified_base 1..2: mod_base = OTHER; note = bicyclic nucleic acid (BNA)
  modified_base 6: mod_base = OTHER; note = bicyclic nucleic acid (BNA)
  modified_base 12: mod_base = OTHER; note = bicyclic nucleic acid (BNA)
  modified_base 21..22: mod_base = OTHER; note = bicyclic nucleic acid (BNA)
  source 1..22: mol_type = other DNA
tcaaggaagatggcatttctag

SEQ ID NO: 15752 - DNA, 22 bp, synthetic construct
  misc_feature 1..22: note = Description of Artificial Sequence: Synthetic Antisense oligonucleotide
  modified_base 1..2: mod_base = OTHER; note = bicyclic nucleic acid (BNA)
  modified_base 5..6: mod_base = OTHER; note = bicyclic nucleic acid (BNA)
  modified_base 21..22: mod_base = OTHER; note = bicyclic nucleic acid (BNA)
  source 1..22: mol_type = other DNA
tcaaggaagatggcatttctag

SEQ ID NO: 15753 - DNA, 22 bp, synthetic construct
  misc_feature 1..22: note = Description of Artificial Sequence: Synthetic Antisense oligonucleotide
  modified_base 1..2: mod_base = OTHER; note = bicyclic nucleic acid (BNA)
  modified_base 9: mod_base = OTHER; note = bicyclic nucleic acid (BNA)
  modified_base 12: mod_base = OTHER; note = bicyclic nucleic acid (BNA)
  modified_base 21..22: mod_base = OTHER; note = bicyclic nucleic acid (BNA)
  source 1..22: mol_type = other DNA
tcaaggaagatggcatttctag

SEQ ID NO: 15754 - DNA, 22 bp, synthetic construct
  misc_feature 1..22: note = Description of Artificial Sequence: Synthetic Antisense oligonucleotide
  modified_base 1..2: mod_base = OTHER; note = bicyclic nucleic acid (BNA)
  modified_base 13: mod_base = OTHER; note = bicyclic nucleic acid (BNA)
  modified_base 19: mod_base = OTHER; note = bicyclic nucleic acid (BNA)
  modified_base 21..22: mod_base = OTHER; note = bicyclic nucleic acid (BNA)
  source 1..22: mol_type = other DNA
tcaaggaagatggcatttctag

SEQ ID NO: 15755 - DNA, 22 bp, synthetic construct
  misc_feature 1..22: note = Description of Artificial Sequence: Synthetic Antisense oligonucleotide
  modified_base 1..2: mod_base = OTHER; note = bicyclic nucleic acid (BNA)
  modified_base 12..13: mod_base = OTHER; note = bicyclic nucleic acid (BNA)
  modified_base 21..22: mod_base = OTHER; note = bicyclic nucleic acid (BNA)
  source 1..22: mol_type = other DNA
tcaaggaagatggcatttctag

SEQ ID NO: 15756 - DNA, 22 bp, synthetic construct
  misc_feature 1..22: note = Description of Artificial Sequence: Synthetic Antisense oligonucleotide
  modified_base 1..2: mod_base = OTHER; note = bicyclic nucleic acid (BNA)
  modified_base 5: mod_base = OTHER; note = bicyclic nucleic acid (BNA)
  modified_base 12: mod_base = OTHER; note = bicyclic nucleic acid (BNA)
  modified_base 21..22: mod_base = OTHER; note = bicyclic nucleic acid (BNA)
  source 1..22: mol_type = other DNA
tcaaggaagatggcatttctag

SEQ ID NO: 15757 - DNA, 22 bp, synthetic construct
  misc_feature 1..22: note = Description of Artificial Sequence: Synthetic Antisense oligonucleotide
  modified_base 1..2: mod_base = OTHER; note = bicyclic nucleic acid (BNA)
  modified_base 9: mod_base = OTHER; note = bicyclic nucleic acid (BNA)
  modified_base 13: mod_base = OTHER; note = bicyclic nucleic acid (BNA)
  modified_base 21..22: mod_base = OTHER; note = bicyclic nucleic acid (BNA)
  source 1..22: mol_type = other DNA
tcaaggaagatggcatttctag

SEQ ID NO: 15758 - DNA, 22 bp, synthetic construct
  misc_feature 1..22: note = Description of Artificial Sequence: Synthetic Antisense oligonucleotide
  modified_base 1..2: mod_base = OTHER; note = bicyclic nucleic acid (BNA)
  modified_base 14: mod_base = OTHER; note = bicyclic nucleic acid (BNA)
  modified_base 19: mod_base = OTHER; note = bicyclic nucleic acid (BNA)
  modified_base 21..22: mod_base = OTHER; note = bicyclic nucleic acid (BNA)
  source 1..22: mol_type = other DNA
tcaaggaagatggcatttctag

SEQ ID NO: 15759 - DNA, 22 bp, synthetic construct
  misc_feature 1..22: note = Description of Artificial Sequence: Synthetic Antisense oligonucleotide
  modified_base 1..2: mod_base = OTHER; note = bicyclic nucleic acid (BNA)
  modified_base 9: mod_base = OTHER; note = bicyclic nucleic acid (BNA)
  modified_base 19: mod_base = OTHER; note = bicyclic nucleic acid (BNA)
  modified_base 21..22: mod_base = OTHER; note = bicyclic nucleic acid (BNA)
  source 1..22: mol_type = other DNA
tcaaggaagatggcatttctag

SEQ ID NO: 15760 - DNA, 18 bp, synthetic construct
  misc_feature 1..18: note = Description of Artificial Sequence: Synthetic Antisense oligonucleotide
  modified_base 1..2: mod_base = OTHER; note = bicyclic nucleic acid (BNA)
  modified_base 9: mod_base = OTHER; note = bicyclic nucleic acid (BNA)
  modified_base 17..18: mod_base = OTHER; note = bicyclic nucleic acid (BNA)
  modified_base 9: mod_base = OTHER; note = 5-methyl
  modified_base 13..14: mod_base = OTHER; note = 5-methyl
  modified_base 18: mod_base = OTHER; note = 5-methyl
  source 1..18: mol_type = other DNA
ggtaagttctgtccaagc

SEQ ID NO: 15761 - DNA, 18 bp, synthetic construct
  misc_feature 1..18: note = Description of Artificial Sequence: Synthetic Antisense oligonucleotide
  modified_base 1..2: mod_base = OTHER; note = bicyclic nucleic acid (BNA)
  modified_base 11: mod_base = OTHER; note = bicyclic nucleic acid (BNA)
  modified_base 17..18: mod_base = OTHER; note = bicyclic nucleic acid (BNA)
  modified_base 9: mod_base = OTHER; note = 5-methyl
  modified_base 13..14: mod_base = OTHER; note = 5-methyl
  modified_base 18: mod_base = OTHER; note = 5-methyl
  source 1..18: mol_type = other DNA
ggtaagttctgtccaagc

SEQ ID NO: 15762 - DNA, 18 bp, synthetic construct
  misc_feature 1..18: note = Description of Artificial Sequence: Synthetic Antisense oligonucleotide
  modified_base 1..2: mod_base = OTHER; note = bicyclic nucleic acid (BNA)
  modified_base 6: mod_base = OTHER; note = bicyclic nucleic acid (BNA)
  modified_base 17..18: mod_base = OTHER; note = bicyclic nucleic acid (BNA)
  modified_base 9: mod_base = OTHER; note = 5-methyl
  modified_base 13..14: mod_base = OTHER; note = 5-methyl
  modified_base 18: mod_base = OTHER; note = 5-methyl
  source 1..18: mol_type = other DNA
ggtaagttctgtccaagc

SEQ ID NO: 15763 - DNA, 18 bp, synthetic construct
  misc_feature 1..18: note = Description of Artificial Sequence: Synthetic Antisense oligonucleotide
  modified_base 1..2: mod_base = OTHER; note = bicyclic nucleic acid (BNA)
  modified_base 13: mod_base = OTHER; note = bicyclic nucleic acid (BNA)
  modified_base 17..18: mod_base = OTHER; note = bicyclic nucleic acid (BNA)
  modified_base 9: mod_base = OTHER; note = 5-methyl
  modified_base 13..14: mod_base = OTHER; note = 5-methyl
  modified_base 18: mod_base = OTHER; note = 5-methyl
  source 1..18: mol_type = other DNA
ggtaagttctgtccaagc

SEQ ID NO: 15764 - DNA, 18 bp, synthetic construct
  misc_feature 1..18: note = Description of Artificial Sequence: Synthetic Antisense oligonucleotide
  modified_base 1..2: mod_base = OTHER; note = bicyclic nucleic acid (BNA)
  modified_base 14: mod_base = OTHER; note = bicyclic nucleic acid (BNA)
  modified_base 17..18: mod_base = OTHER; note = bicyclic nucleic acid (BNA)
  modified_base 9: mod_base = OTHER; note = 5-methyl
  modified_base 13..14: mod_base = OTHER; note = 5-methyl
  modified_base 18: mod_base = OTHER; note = 5-methyl
  source 1..18: mol_type = other DNA
ggtaagttctgtccaagc

SEQ ID NO: 15765 - DNA, 18 bp, synthetic construct
  misc_feature 1..18: note = Description of Artificial Sequence: Synthetic Antisense oligonucleotide
  modified_base 1..2: mod_base = OTHER; note = bicyclic nucleic acid (BNA)
  modified_base 16..18: mod_base = OTHER; note = bicyclic nucleic acid (BNA)
  modified_base 8: mod_base = OTHER; note = 5-methyl
  modified_base 12..13: mod_base = OTHER; note = 5-methyl
  modified_base 17..18: mod_base = OTHER; note = 5-methyl
  source 1..18: mol_type = other DNA
gtaagttctgtccaagcc

SEQ ID NO: 15766 - DNA, 18 bp, synthetic construct
  misc_feature 1..18: note = Description of Artificial Sequence: Synthetic Antisense oligonucleotide
  modified_base 1..2: mod_base = OTHER; note = bicyclic nucleic acid (BNA)
  modified_base 10: mod_base = OTHER; note = bicyclic nucleic acid (BNA)
  modified_base 17..18: mod_base = OTHER; note = bicyclic nucleic acid (BNA)
  modified_base 8: mod_base = OTHER; note = 5-methyl
  modified_base 12..13: mod_base = OTHER; note = 5-methyl
  modified_base 17..18: mod_base = OTHER; note = 5-methyl
  source 1..18: mol_type = other DNA
gtaagttctgtccaagcc

SEQ ID NO: 15767 - DNA, 18 bp, synthetic construct
  misc_feature 1..18: note = Description of Artificial Sequence: Synthetic Antisense oligonucleotide
  modified_base 1..2: mod_base = OTHER; note = bicyclic nucleic acid (BNA)
  modified_base 5: mod_base = OTHER; note = bicyclic nucleic acid (BNA)
  modified_base 17..18: mod_base = OTHER; note = bicyclic nucleic acid (BNA)
  modified_base 8: mod_base = OTHER; note = 5-methyl
  modified_base 12..13: mod_base = OTHER; note = 5-methyl
  modified_base 17..18: mod_base = OTHER; note = 5-methyl
  source 1..18: mol_type = other DNA
gtaagttctgtccaagcc

SEQ ID NO: 15768 - DNA, 18 bp, synthetic construct
  misc_feature 1..18: note = Description of Artificial Sequence: Synthetic Antisense oligonucleotide
  modified_base 1..2: mod_base = OTHER; note = bicyclic nucleic acid (BNA)
  modified_base 12: mod_base = OTHER; note = bicyclic nucleic acid (BNA)
  modified_base 17..18: mod_base = OTHER; note = bicyclic nucleic acid (BNA)
  modified_base 8: mod_base = OTHER; note = 5-methyl
  modified_base 12..13: mod_base = OTHER; note = 5-methyl
  modified_base 17..18: mod_base = OTHER; note = 5-methyl
  source 1..18: mol_type = other DNA
gtaagttctgtccaagcc

SEQ ID NO: 15769 - DNA, 18 bp, synthetic construct
  misc_feature 1..18: note = Description of Artificial Sequence: Synthetic Antisense oligonucleotide
  modified_base 1..2: mod_base = OTHER; note = bicyclic nucleic acid (BNA)
  modified_base 13: mod_base = OTHER; note = bicyclic nucleic acid (BNA)
  modified_base 17..18: mod_base = OTHER; note = bicyclic nucleic acid (BNA)
  modified_base 8: mod_base = OTHER; note = 5-methyl
  modified_base 12..13: mod_base = OTHER; note = 5-methyl
  modified_base 17..18: mod_base = OTHER; note = 5-methyl
  source 1..18: mol_type = other DNA
gtaagttctgtccaagcc

SEQ ID NO: 15770 - DNA, 18 bp, synthetic construct
  misc_feature 1..18: note = Description of Artificial Sequence: Synthetic Antisense oligonucleotide
  modified_base 1..2: mod_base = OTHER; note = bicyclic nucleic acid (BNA)
  modified_base 8: mod_base = OTHER; note = bicyclic nucleic acid (BNA)
  modified_base 17..18: mod_base = OTHER; note = bicyclic nucleic acid (BNA)
  modified_base 8: mod_base = OTHER; note = 5-methyl
  modified_base 12..13: mod_base = OTHER; note = 5-methyl
  modified_base 17..18: mod_base = OTHER; note = 5-methyl
  source 1..18: mol_type = other DNA
gtaagttctgtccaagcc

SEQ ID NO: 15771 - DNA, 18 bp, synthetic construct
  misc_feature 1..18: note = Description of Artificial Sequence: Synthetic Antisense oligonucleotide
  modified_base 1..2: mod_base = OTHER; note = bicyclic nucleic acid (BNA)
  modified_base 4: mod_base = OTHER; note = bicyclic nucleic acid (BNA)
  modified_base 17..18: mod_base = OTHER; note = bicyclic nucleic acid (BNA)
  modified_base 4: mod_base = OTHER; note = 5-methyl
  modified_base 13: mod_base = OTHER; note = 5-methyl
  modified_base 17..18: mod_base = OTHER; note = 5-methyl
  source 1..18: mol_type = other DNA
agtcggtaagttctgtcc

SEQ ID NO: 15772 - DNA, 18 bp, synthetic construct
  misc_feature 1..18: note = Description of Artificial Sequence: Synthetic Antisense oligonucleotide
  modified_base 1..2: mod_base = OTHER; note = bicyclic nucleic acid (BNA)
  modified_base 10: mod_base = OTHER; note = bicyclic nucleic acid (BNA)
  modified_base 17..18: mod_base = OTHER; note = bicyclic nucleic acid (BNA)
  modified_base 4: mod_base = OTHER; note = 5-methyl
  modified_base 13: mod_base = OTHER; note = 5-methyl
  modified_base 17..18: mod_base = OTHER; note = 5-methyl
  source 1..18: mol_type = other DNA
agtcggtaagttctgtcc

SEQ ID NO: 15773 - DNA, 18 bp, synthetic construct
  misc_feature 1..18: note = Description of Artificial Sequence: Synthetic Antisense oligonucleotide
  modified_base 1..2: mod_base = OTHER; note = bicyclic nucleic acid (BNA)
  modified_base 5: mod_base = OTHER; note = bicyclic nucleic acid (BNA)
  modified_base 17..18: mod_base = OTHER; note = bicyclic nucleic acid (BNA)
  modified_base 4: mod_base = OTHER; note = 5-methyl
  modified_base 13: mod_base = OTHER; note = 5-methyl
  modified_base 17..18: mod_base = OTHER; note = 5-methyl
  source 1..18: mol_type = other DNA
agtcggtaagttctgtcc

SEQ ID NO: 15774 - DNA, 18 bp, synthetic construct
  misc_feature 1..18: note = Description of Artificial Sequence: Synthetic Antisense oligonucleotide
  modified_base 1..2: mod_base = OTHER; note = bicyclic nucleic acid (BNA)
  modified_base 6: mod_base = OTHER; note = bicyclic nucleic acid (BNA)
  modified_base 17..18: mod_base = OTHER; note = bicyclic nucleic acid (BNA)
  modified_base 4: mod_base = OTHER; note = 5-methyl
  modified_base 13: mod_base = OTHER; note = 5-methyl
  modified_base 17..18: mod_base = OTHER; note = 5-methyl
  source 1..18: mol_type = other DNA
agtcggtaagttctgtcc

SEQ ID NO: 15775 - DNA, 18 bp, synthetic construct
  misc_feature 1..18: note = Description of Artificial Sequence: Synthetic Antisense oligonucleotide
  modified_base 1..2: mod_base = OTHER; note = bicyclic nucleic acid (BNA)
  modified_base 13: mod_base = OTHER; note = bicyclic nucleic acid (BNA)
  modified_base 17..18: mod_base = OTHER; note = bicyclic nucleic acid (BNA)
  modified_base 4: mod_base = OTHER; note = 5-methyl
  modified_base 13: mod_base = OTHER; note = 5-methyl
  modified_base 17..18: mod_base = OTHER; note = 5-methyl
  source 1..18: mol_type = other DNA
agtcggtaagttctgtcc

SEQ ID NO: 15776 - DNA, 18 bp, synthetic construct
  misc_feature 1..18: note = Description of Artificial Sequence: Synthetic Antisense oligonucleotide
  modified_base 1..2: mod_base = OTHER; note = bicyclic nucleic acid (BNA)
  modified_base 15: mod_base = OTHER; note = bicyclic nucleic acid (BNA)
  modified_base 17..18: mod_base = OTHER; note = bicyclic nucleic acid (BNA)
  modified_base 4: mod_base = OTHER; note = 5-methyl
  modified_base 13: mod_base = OTHER; note = 5-methyl
  modified_base 17..18: mod_base = OTHER; note = 5-methyl
  source 1..18: mol_type = other DNA
agtcggtaagttctgtcc

SEQ ID NO: 15777 - DNA, 18 bp, synthetic construct
  misc_feature 1..18: note = Description of Artificial Sequence: Synthetic Antisense oligonucleotide
  modified_base 1: mod_base = OTHER; note = 5-methyl
  modified_base 5..6: mod_base = OTHER; note = 5-methyl
  modified_base 10..12: mod_base = OTHER; note = 5-methyl
  modified_base 1..3: mod_base = OTHER; note = bicyclic nucleic acid (BNA)
  modified_base 17..18: mod_base = OTHER; note = bicyclic nucleic acid (BNA)
  source 1..18: mol_type = other DNA
ctgtccaagcccggttga

SEQ ID NO: 15778 - DNA, 18 bp, synthetic construct
  misc_feature 1..18: note = Description of Artificial Sequence: Synthetic Antisense oligonucleotide
  modified_base 1: mod_base = OTHER; note = 5-methyl
  modified_base 5..6: mod_base = OTHER; note = 5-methyl
  modified_base 10..12: mod_base = OTHER; note = 5-methyl
  modified_base 1..2: mod_base = OTHER; note = bicyclic nucleic acid (BNA)
  modified_base 9: mod_base = OTHER; note = bicyclic nucleic acid (BNA)
  modified_base 17..18: mod_base = OTHER; note = bicyclic nucleic acid (BNA)
  source 1..18: mol_type = other DNA
ctgtccaagcccggttga

SEQ ID NO: 15779 - DNA, 18 bp, synthetic construct
  misc_feature 1..18: note = Description of Artificial Sequence: Synthetic Antisense oligonucleotide
  modified_base 1: mod_base = OTHER; note = 5-methyl
  modified_base 5..6: mod_base = OTHER; note = 5-methyl
  modified_base 10..12: mod_base = OTHER; note = 5-methyl
  modified_base 1..2: mod_base = OTHER; note = bicyclic nucleic acid (BNA)
  modified_base 10: mod_base = OTHER; note = bicyclic nucleic acid (BNA)
  modified_base 17..18: mod_base = OTHER; note = bicyclic nucleic acid (BNA)
  source 1..18: mol_type = other DNA
ctgtccaagcccggttga

SEQ ID NO: 15780 - DNA, 18 bp, synthetic construct
  misc_feature 1..18: note = Description of Artificial Sequence: Synthetic Antisense oligonucleotide
  modified_base 1: mod_base = OTHER; note = 5-methyl
  modified_base 5..6: mod_base = OTHER; note = 5-methyl
  modified_base 10..12: mod_base = OTHER; note = 5-methyl
  modified_base 1..2: mod_base = OTHER; note = bicyclic nucleic acid (BNA)
  modified_base 5: mod_base = OTHER; note = bicyclic nucleic acid (BNA)
  modified_base 17..18: mod_base = OTHER; note = bicyclic nucleic acid (BNA)
  source 1..18: mol_type = other DNA
ctgtccaagcccggttga

SEQ ID NO: 15781 - DNA, 18 bp, synthetic construct
  misc_feature 1..18: note = Description of Artificial Sequence: Synthetic Antisense oligonucleotide
  modified_base 1: mod_base = OTHER; note = 5-methyl
  modified_base 5..6: mod_base = OTHER; note = 5-methyl
  modified_base 10..12: mod_base = OTHER; note = 5-methyl
  modified_base 1..2: mod_base = OTHER; note = bicyclic nucleic acid (BNA)
  modified_base 11: mod_base = OTHER; note = bicyclic nucleic acid (BNA)
  modified_base 17..18: mod_base = OTHER; note = bicyclic nucleic acid (BNA)
  source 1..18: mol_type = other DNA
ctgtccaagcccggttga

SEQ ID NO: 15782 - DNA, 18 bp, synthetic construct
  misc_feature 1..18: note = Description of Artificial Sequence: Synthetic Antisense oligonucleotide
  modified_base 1: mod_base = OTHER; note = 5-methyl
  modified_base 5..6: mod_base = OTHER; note = 5-methyl
  modified_base 10..12: mod_base = OTHER; note = 5-methyl
  modified_base 1..2: mod_base = OTHER; note = bicyclic nucleic acid (BNA)
  modified_base 6: mod_base = OTHER; note = bicyclic nucleic acid (BNA)
  modified_base 17..18: mod_base = OTHER; note = bicyclic nucleic acid (BNA)
  source 1..18: mol_type = other DNA
ctgtccaagcccggttga

SEQ ID NO: 15783 - DNA, 18 bp, synthetic construct
  misc_feature 1..18: note = Description of Artificial Sequence: Synthetic Antisense oligonucleotide
  modified_base 1: mod_base = OTHER; note = 5-methyl
  modified_base 5..6: mod_base = OTHER; note = 5-methyl
  modified_base 10..12: mod_base = OTHER; note = 5-methyl
  modified_base 1..2: mod_base = OTHER; note = bicyclic nucleic acid (BNA)
  modified_base 12: mod_base = OTHER; note = bicyclic nucleic acid (BNA)
  modified_base 17..18: mod_base = OTHER; note = bicyclic nucleic acid (BNA)
  source 1..18: mol_type = other DNA
ctgtccaagcccggttga

SEQ ID NO: 15784 - DNA, 18 bp, synthetic construct
  misc_feature 1..18: note = Description of Artificial Sequence: Synthetic Antisense oligonucleotide
  modified_base 1: mod_base = OTHER; note = 5-methyl
  modified_base 5..6: mod_base = OTHER; note = 5-methyl
  modified_base 10..12: mod_base = OTHER; note = 5-methyl
  modified_base 1..2: mod_base = OTHER; note = bicyclic nucleic acid (BNA)
  modified_base 13: mod_base = OTHER; note = bicyclic nucleic acid (BNA)
  modified_base 17..18: mod_base = OTHER; note = bicyclic nucleic acid (BNA)
  source 1..18: mol_type = other DNA
ctgtccaagcccggttga

SEQ ID NO: 15785 - DNA, 18 bp, synthetic construct
  misc_feature 1..18: note = Description of Artificial Sequence: Synthetic Antisense oligonucleotide
  modified_base 1: mod_base = OTHER; note = 5-methyl
  modified_base 5..6: mod_base = OTHER; note = 5-methyl
  modified_base 10..12: mod_base = OTHER; note = 5-methyl
  modified_base 1..2: mod_base = OTHER; note = bicyclic nucleic acid (BNA)
  modified_base 14: mod_base = OTHER; note = bicyclic nucleic acid (BNA)
  modified_base 17..18: mod_base = OTHER; note = bicyclic nucleic acid (BNA)
  source 1..18: mol_type = other DNA
ctgtccaagcccggttga

SEQ ID NO: 15786 - DNA, 18 bp, synthetic construct
  misc_feature 1..18: note = Description of Artificial Sequence: Synthetic Antisense oligonucleotide
  modified_base 1..2: mod_base = OTHER; note = bicyclic nucleic acid (BNA)
  modified_base 9: mod_base = OTHER; note = bicyclic nucleic acid (BNA)
  modified_base 14: mod_base = OTHER; note = bicyclic nucleic acid (BNA)
  modified_base 17..18: mod_base = OTHER; note = bicyclic nucleic acid (BNA)
  modified_base 9: mod_base = OTHER; note = 5-methyl
  modified_base 13..14: mod_base = OTHER; note = 5-methyl
  modified_base 18: mod_base = OTHER; note = 5-methyl
  source 1..18: mol_type = other DNA
ggtaagttctgtccaagc

SEQ ID NO: 15787 - DNA, 18 bp, synthetic construct
  misc_feature 1..18: note = Description of Artificial Sequence: Synthetic Antisense oligonucleotide
  modified_base 1..2: mod_base = OTHER; note = bicyclic nucleic acid (BNA)
  modified_base 6: mod_base = OTHER; note = bicyclic nucleic acid (BNA)
  modified_base 14: mod_base = OTHER; note = bicyclic nucleic acid (BNA)
  modified_base 17..18: mod_base = OTHER; note = bicyclic nucleic acid (BNA)
  modified_base 9: mod_base = OTHER; note = 5-methyl
  modified_base 13..14: mod_base = OTHER; note = 5-methyl
  modified_base 18: mod_base = OTHER; note = 5-methyl
  source 1..18: mol_type = other DNA
ggtaagttctgtccaagc

SEQ ID NO: 15788 - DNA, 18 bp, synthetic construct
  misc_feature 1..18: note = Description of Artificial Sequence: Synthetic Antisense oligonucleotide
  modified_base 1..2: mod_base = OTHER; note = bicyclic nucleic acid (BNA)
  modified_base 6: mod_base = OTHER; note = bicyclic nucleic acid (BNA)
  modified_base 9: mod_base = OTHER; note = bicyclic nucleic acid (BNA)
  modified_base 17..18: mod_base = OTHER; note = bicyclic nucleic acid (BNA)
  modified_base 9: mod_base = OTHER; note = 5-methyl
  modified_base 13..14: mod_base = OTHER; note = 5-methyl
  modified_base 18: mod_base = OTHER; note = 5-methyl
  source 1..18: mol_type = other DNA
ggtaagttctgtccaagc

SEQ ID NO: 15789 - DNA, 18 bp, synthetic construct
  misc_feature 1..18: note = Description of Artificial Sequence: Synthetic Antisense oligonucleotide
  modified_base 1..2: mod_base = OTHER; note = bicyclic nucleic acid (BNA)
  modified_base 13..14: mod_base = OTHER; note = bicyclic nucleic acid (BNA)
  modified_base 17..18: mod_base = OTHER; note = bicyclic nucleic acid (BNA)
  modified_base 9: mod_base = OTHER; note = 5-methyl
  modified_base 13..14: mod_base = OTHER; note = 5-methyl
  modified_base 18: mod_base = OTHER; note = 5-methyl
  source 1..18: mol_type = other DNA
ggtaagttctgtccaagc

SEQ ID NO: 15790 - DNA, 18 bp, synthetic construct
  misc_feature 1..18: note = Description of Artificial Sequence: Synthetic Antisense oligonucleotide
  modified_base 1..2: mod_base = OTHER; note = bicyclic nucleic acid (BNA)
  modified_base 6: mod_base = OTHER; note = bicyclic nucleic acid (BNA)
  modified_base 13: mod_base = OTHER; note = bicyclic nucleic acid (BNA)
  modified_base 17..18: mod_base = OTHER; note = bicyclic nucleic acid (BNA)
  modified_base 9: mod_base = OTHER; note = 5-methyl
  modified_base 13..14: mod_base = OTHER; note = 5-methyl
  modified_base 18: mod_base = OTHER; note = 5-methyl
  source 1..18: mol_type = other DNA
ggtaagttctgtccaagc

SEQ ID NO: 15791 - DNA, 18 bp, synthetic construct
  misc_feature 1..18: note = Description of Artificial Sequence: Synthetic Antisense oligonucleotide
  modified_base 1..2: mod_base = OTHER; note = bicyclic nucleic acid (BNA)
  modified_base 9: mod_base = OTHER; note = bicyclic nucleic acid (BNA)
  modified_base 11: mod_base = OTHER; note = bicyclic nucleic acid (BNA)
  modified_base 17..18: mod_base = OTHER; note = bicyclic nucleic acid (BNA)
  modified_base 9: mod_base = OTHER; note = 5-methyl
  modified_base 13..14: mod_base = OTHER; note = 5-methyl
  modified_base 18: mod_base = OTHER; note = 5-methyl
  source 1..18: mol_type = other DNA
ggtaagttctgtccaagc

SEQ ID NO: 15792 - DNA, 18 bp, synthetic construct
  misc_feature 1..18: note = Description of Artificial Sequence: Synthetic Antisense oligonucleotide
  modified_base 1..2: mod_base = OTHER; note = bicyclic nucleic acid (BNA)
  modified_base 11: mod_base = OTHER; note = bicyclic nucleic acid (BNA)
  modified_base 13: mod_base = OTHER; note = bicyclic nucleic acid (BNA)
  modified_base 17..18: mod_base = OTHER; note = bicyclic nucleic acid (BNA)
  modified_base 9: mod_base = OTHER; note = 5-methyl
  modified_base 13..14: mod_base = OTHER; note = 5-methyl
  modified_base 18: mod_base = OTHER; note = 5-methyl
  source 1..18: mol_type = other DNA
ggtaagttctgtccaagc

SEQ ID NO: 15793 - DNA, 18 bp, synthetic construct
  misc_feature 1..18: note = Description of Artificial Sequence: Synthetic Antisense oligonucleotide
  modified_base 1..2: mod_base = OTHER; note = bicyclic nucleic acid (BNA)
  modified_base 11: mod_base = OTHER; note = bicyclic nucleic acid (BNA)
  modified_base 14: mod_base = OTHER; note = bicyclic nucleic acid (BNA)
  modified_base 17..18: mod_base = OTHER; note = bicyclic nucleic acid (BNA)
  modified_base 9: mod_base = OTHER; note = 5-methyl
  modified_base 13..14: mod_base = OTHER; note = 5-methyl
  modified_base 18: mod_base = OTHER; note = 5-methyl
  source 1..18: mol_type = other DNA
ggtaagttctgtccaagc

SEQ ID NO: 15794 - DNA, 18 bp, synthetic construct
  misc_feature 1..18: note = Description of Artificial Sequence: Synthetic Antisense oligonucleotide
  modified_base 1..2: mod_base = OTHER; note = bicyclic nucleic acid (BNA)
  modified_base 6: mod_base = OTHER; note = bicyclic nucleic acid (BNA)
  modified_base 11: mod_base = OTHER; note = bicyclic nucleic acid (BNA)
  modified_base 17..18: mod_base = OTHER; note = bicyclic nucleic acid (BNA)
  modified_base 9: mod_base = OTHER; note = 5-methyl
  modified_base 13..14: mod_base = OTHER; note = 5-methyl
  modified_base 18: mod_base = OTHER; note = 5-methyl
  source 1..18: mol_type = other DNA
ggtaagttctgtccaagc

SEQ ID NO: 15795 - DNA, 18 bp, synthetic construct
  misc_feature 1..18: note = Description of Artificial Sequence: Synthetic Antisense oligonucleotide
  modified_base 1..2: mod_base = OTHER; note = bicyclic nucleic acid (BNA)
  modified_base 9: mod_base = OTHER; note = bicyclic nucleic acid (BNA)
  modified_base 13: mod_base = OTHER; note = bicyclic nucleic acid (BNA)
  modified_base 17..18: mod_base = OTHER; note = bicyclic nucleic acid (BNA)
  modified_base 9: mod_base = OTHER; note = 5-methyl
  modified_base 13..14: mod_base = OTHER; note = 5-methyl
  modified_base 18: mod_base = OTHER; note = 5-methyl
  source 1..18: mol_type = other DNA
ggtaagttctgtccaagc

SEQ ID NO: 15796 - DNA, 18 bp, synthetic construct
  misc_feature 1..18: note = Description of Artificial Sequence: Synthetic Antisense oligonucleotide
  modified_base 1..2: mod_base = OTHER; note = bicyclic nucleic acid (BNA)
  modified_base 5: mod_base = OTHER; note = bicyclic nucleic acid (BNA)
  modified_base 8: mod_base = OTHER; note = bicyclic nucleic acid (BNA)
  modified_base 17..18: mod_base = OTHER; note = bicyclic nucleic acid (BNA)
  modified_base 8: mod_base = OTHER; note = 5-methyl
  modified_base 12..13: mod_base = OTHER; note = 5-methyl
  modified_base 17..18: mod_base = OTHER; note = 5-methyl
  source 1..18: mol_type = other DNA
gtaagttctgtccaagcc

SEQ ID NO: 15797 - DNA, 18 bp, synthetic construct
  misc_feature 1..18: note = Description of Artificial Sequence: Synthetic Antisense oligonucleotide
  modified_base 1..2: mod_base = OTHER; note = bicyclic nucleic acid (BNA)
  modified_base 8: mod_base = OTHER; note = bicyclic nucleic acid (BNA)
  modified_base 13: mod_base = OTHER; note = bicyclic nucleic acid (BNA)
  modified_base 17..18: mod_base = OTHER; note = bicyclic nucleic acid (BNA)
  modified_base 8: mod_base = OTHER; note = 5-methyl
  modified_base 12..13: mod_base = OTHER; note = 5-methyl
  modified_base 17..18: mod_base = OTHER; note = 5-methyl
  source 1..18: mol_type = other DNA
gtaagttctgtccaagcc

SEQ ID NO: 15798 - DNA, 18 bp, synthetic construct
  misc_feature 1..18: note = Description of Artificial Sequence: Synthetic Antisense oligonucleotide
  modified_base 1..2: mod_base = OTHER; note = bicyclic nucleic acid (BNA)
  modified_base 5: mod_base = OTHER; note = bicyclic nucleic acid (BNA)
  modified_base 13: mod_base = OTHER; note = bicyclic nucleic acid (BNA)
  modified_base 17..18: mod_base = OTHER; note = bicyclic nucleic acid (BNA)
  modified_base 8: mod_base = OTHER; note = 5-methyl
  modified_base 12..13: mod_base = OTHER; note = 5-methyl
  modified_base 17..18: mod_base = OTHER; note = 5-methyl
  source 1..18: mol_type = other DNA
gtaagttctgtccaagcc

SEQ ID NO: 15799 - DNA, 18 bp, synthetic construct
  misc_feature 1..18: note = Description of Artificial Sequence: Synthetic Antisense oligonucleotide
  modified_base 1..2: mod_base = OTHER; note = bicyclic nucleic acid (BNA)
  modified_base 8: mod_base = OTHER; note = bicyclic nucleic acid (BNA)
  modified_base 12: mod_base = OTHER; note = bicyclic nucleic acid (BNA)
  modified_base 17..18: mod_base = OTHER; note = bicyclic nucleic acid (BNA)
  modified_base 8: mod_base = OTHER; note = 5-methyl
  modified_base 12..13: mod_base = OTHER; note = 5-methyl
  modified_base 17..18: mod_base = OTHER; note = 5-methyl
  source 1..18: mol_type = other DNA
gtaagttctgtccaagcc

SEQ ID NO: 15800 - DNA, 18 bp, synthetic construct
  misc_feature 1..18: note = Description of Artificial Sequence: Synthetic Antisense oligonucleotide
  modified_base 1..2: mod_base = OTHER; note = bicyclic nucleic acid (BNA)
  modified_base 5: mod_base = OTHER; note = bicyclic nucleic acid (BNA)
  modified_base 10: mod_base = OTHER; note = bicyclic nucleic acid (BNA)
  modified_base 17..18: mod_base = OTHER; note = bicyclic nucleic acid (BNA)
  modified_base 8: mod_base = OTHER; note = 5-methyl
  modified_base 12..13: mod_base = OTHER; note = 5-methyl
  modified_base 17..18: mod_base = OTHER; note = 5-methyl
  source 1..18: mol_type = other DNA
gtaagttctgtccaagcc

SEQ ID NO: 15801 - DNA, 18 bp, synthetic construct
  misc_feature 1..18: note = Description of Artificial Sequence: Synthetic Antisense oligonucleotide
  modified_base 1..2: mod_base = OTHER; note = bicyclic nucleic acid (BNA)
  modified_base 8: mod_base = OTHER; note = bicyclic nucleic acid (BNA)
  modified_base 16..18: mod_base = OTHER; note = bicyclic nucleic acid (BNA)
  modified_base 8: mod_base = OTHER; note = 5-methyl
  modified_base 12..13: mod_base = OTHER; note = 5-methyl
  modified_base 17..18: mod_base = OTHER; note = 5-methyl
  source 1..18: mol_type = other DNA
gtaagttctgtccaagcc

SEQ ID NO: 15802 - DNA, 18 bp, synthetic construct
  misc_feature 1..18: note = Description of Artificial Sequence: Synthetic Antisense oligonucleotide
  modified_base 1..2: mod_base = OTHER; note = bicyclic nucleic acid (BNA)
  modified_base 10: mod_base = OTHER; note = bicyclic nucleic acid (BNA)
  modified_base 16..18: mod_base = OTHER; note = bicyclic nucleic acid (BNA)
  modified_base 8: mod_base = OTHER; note = 5-methyl
  modified_base 12..13: mod_base = OTHER; note = 5-methyl
  modified_base 17..18: mod_base = OTHER; note = 5-methyl
  source 1..18: mol_type = other DNA
gtaagttctgtccaagcc

SEQ ID NO: 15803 - DNA, 18 bp, synthetic construct
  misc_feature 1..18: note = Description of Artificial Sequence: Synthetic Antisense oligonucleotide
  modified_base 1..2: mod_base = OTHER; note = bicyclic nucleic acid (BNA)
  modified_base 10: mod_base = OTHER; note = bicyclic nucleic acid (BNA)
  modified_base 12: mod_base = OTHER; note = bicyclic nucleic acid (BNA)
  modified_base 17..18: mod_base = OTHER; note = bicyclic nucleic acid (BNA)
  modified_base 8: mod_base = OTHER; note = 5-methyl
  modified_base 12..13: mod_base = OTHER; note = 5-methyl
  modified_base 17..18: mod_base = OTHER; note = 5-methyl
  source 1..18: mol_type = other DNA
gtaagttctgtccaagcc

SEQ ID NO: 15804 - DNA, 18 bp, synthetic construct
  misc_feature 1..18: note = Description of Artificial Sequence: Synthetic Antisense oligonucleotide
  modified_base 1..2: mod_base = OTHER; note = bicyclic nucleic acid (BNA)
  modified_base 12..13: mod_base = OTHER; note = bicyclic nucleic acid (BNA)
  modified_base 17..18: mod_base = OTHER; note = bicyclic nucleic acid (BNA)
  modified_base 8: mod_base = OTHER; note = 5-methyl
  modified_base 12..13: mod_base = OTHER; note = 5-methyl
  modified_base 17..18: mod_base = OTHER; note = 5-methyl
  source 1..18: mol_type = other DNA
gtaagttctgtccaagcc

SEQ ID NO: 15805 - DNA, 18 bp, synthetic construct
  misc_feature 1..18: note = Description of Artificial Sequence: Synthetic Antisense oligonucleotide
  modified_base 1..2: mod_base = OTHER; note = bicyclic nucleic acid (BNA)
  modified_base 5: mod_base = OTHER; note = bicyclic nucleic acid (BNA)
  modified_base 12: mod_base = OTHER; note = bicyclic nucleic acid (BNA)
  modified_base 17..18: mod_base = OTHER; note = bicyclic nucleic acid (BNA)
  modified_base 8: mod_base = OTHER; note = 5-methyl
  modified_base 12..13: mod_base = OTHER; note = 5-methyl
  modified_base 17..18: mod_base = OTHER; note = 5-methyl
  source 1..18: mol_type = other DNA
gtaagttctgtccaagcc

SEQ ID NO: 15806 - DNA, 18 bp, synthetic construct
  misc_feature 1..18: note = Description of Artificial Sequence: Synthetic Antisense oligonucleotide
  modified_base 1..2: mod_base = OTHER; note = bicyclic nucleic acid (BNA)
  modified_base 8: mod_base = OTHER; note = bicyclic nucleic acid (BNA)
  modified_base 10: mod_base = OTHER; note = bicyclic nucleic acid (BNA)
  modified_base 17..18: mod_base = OTHER; note = bicyclic nucleic acid (BNA)
  modified_base 8: mod_base = OTHER; note = 5-methyl
  modified_base 12..13: mod_base = OTHER; note = 5-methyl
  modified_base 17..18: mod_base = OTHER; note = 5-methyl
  source 1..18: mol_type = other DNA
gtaagttctgtccaagcc

SEQ ID NO: 15807 - DNA, 18 bp, synthetic construct
  misc_feature 1..18: note = Description of Artificial Sequence: Synthetic Antisense oligonucleotide
  modified_base 1..2: mod_base = OTHER; note = bicyclic nucleic acid (BNA)
  modified_base 13: mod_base = OTHER; note = bicyclic nucleic acid (BNA)
  modified_base 16..18: mod_base = OTHER; note = bicyclic nucleic acid (BNA)
  modified_base 8: mod_base = OTHER; note = 5-methyl
  modified_base 12..13: mod_base = OTHER; note = 5-methyl
  modified_base 17..18: mod_base = OTHER; note = 5-methyl
  source 1..18: mol_type = other DNA
gtaagttctgtccaagcc

SEQ ID NO: 15808 - DNA, 18 bp, synthetic construct
  misc_feature 1..18: note = Description of Artificial Sequence: Synthetic Antisense oligonucleotide
  modified_base 1..2: mod_base = OTHER; note = bicyclic nucleic acid (BNA)
  modified_base 5: mod_base = OTHER; note = bicyclic nucleic acid (BNA)
  modified_base 16..18: mod_base = OTHER; note = bicyclic nucleic acid (BNA)
  modified_base 8: mod_base = OTHER; note = 5-methyl
  modified_base 12..13: mod_base = OTHER; note = 5-methyl
  modified_base 17..18: mod_base = OTHER; note = 5-methyl
  source 1..18: mol_type = other DNA
gtaagttctgtccaagcc

SEQ ID NO: 15809 - DNA, 18 bp, synthetic construct
  misc_feature 1..18: note = Description of Artificial Sequence: Synthetic Antisense oligonucleotide
  modified_base 1..2: mod_base = OTHER; note = bicyclic nucleic acid (BNA)
  modified_base 12: mod_base = OTHER; note = bicyclic nucleic acid (BNA)
  modified_base 16..18: mod_base = OTHER; note = bicyclic nucleic acid (BNA)
  modified_base 8: mod_base = OTHER; note = 5-methyl
  modified_base 12..13: mod_base = OTHER; note = 5-methyl
  modified_base 17..18: mod_base = OTHER; note = 5-methyl
  source 1..18: mol_type = other DNA
gtaagttctgtccaagcc

SEQ ID NO: 15810 - DNA, 18 bp, synthetic construct
  misc_feature 1..18: note = Description of Artificial Sequence: Synthetic Antisense oligonucleotide
  modified_base 1..2: mod_base = OTHER; note = bicyclic nucleic acid (BNA)
  modified_base 10: mod_base = OTHER; note = bicyclic nucleic acid (BNA)
  modified_base 13: mod_base = OTHER; note = bicyclic nucleic acid (BNA)
  modified_base 17..18: mod_base = OTHER; note = bicyclic nucleic acid (BNA)
  modified_base 8: mod_base = OTHER; note = 5-methyl
  modified_base 12..13: mod_base = OTHER; note = 5-methyl
  modified_base 17..18: mod_base = OTHER; note = 5-methyl
  source 1..18: mol_type = other DNA
gtaagttctgtccaagcc

SEQ ID NO: 15811 - DNA, 18 bp, synthetic construct
  misc_feature 1..18: note = Description of Artificial Sequence: Synthetic Antisense oligonucleotide
  modified_base 1..2: mod_base = OTHER; note = bicyclic nucleic acid (BNA)
  modified_base 6: mod_base = OTHER; note = bicyclic nucleic acid (BNA)
  modified_base 10: mod_base = OTHER; note = bicyclic nucleic acid (BNA)
  modified_base 17..18: mod_base = OTHER; note = bicyclic nucleic acid (BNA)
  modified_base 4: mod_base = OTHER; note = 5-methyl
  modified_base 13: mod_base = OTHER; note = 5-methyl
  modified_base 17..18: mod_base = OTHER; note = 5-methyl
  source 1..18: mol_type = other DNA
agtcggtaagttctgtcc

SEQ ID NO: 15812 - DNA, 18 bp, synthetic construct
  misc_feature 1..18: note = Description of Artificial Sequence: Synthetic Antisense oligonucleotide
  modified_base 1..2: mod_base = OTHER; note = bicyclic nucleic acid (BNA)
  modified_base 5: mod_base = OTHER; note = bicyclic nucleic acid (BNA)
  modified_base 13: mod_base = OTHER; note = bicyclic nucleic acid (BNA)
  modified_base 17..18: mod_base = OTHER; note = bicyclic nucleic acid (BNA)
  modified_base 4: mod_base = OTHER; note = 5-methyl
  modified_base 13: mod_base = OTHER; note = 5-methyl
  modified_base 17..18: mod_base = OTHER; note = 5-methyl
  source 1..18: mol_type = other DNA
agtcggtaagttctgtcc

SEQ ID NO: 15813 - DNA, 18 bp, synthetic construct
  misc_feature 1..18: note = Description of Artificial Sequence: Synthetic Antisense oligonucleotide
  modified_base 1..2: mod_base = OTHER; note = bicyclic nucleic acid (BNA)
  modified_base 4: mod_base = OTHER; note = bicyclic nucleic acid (BNA)
  modified_base 15: mod_base = OTHER; note = bicyclic nucleic acid (BNA)
  modified_base 17..18: mod_base = OTHER; note = bicyclic nucleic acid (BNA)
  modified_base 4: mod_base = OTHER; note = 5-methyl
  modified_base 13: mod_base = OTHER; note = 5-methyl
  modified_base 17..18: mod_base = OTHER; note = 5-methyl
  source 1..18: mol_type = other DNA
agtcggtaagttctgtcc

SEQ ID NO: 15814 - DNA, 18 bp, synthetic construct
  misc_feature 1..18: note = Description of Artificial Sequence: Synthetic Antisense oligonucleotide
  modified_base 1..2: mod_base = OTHER; note = bicyclic nucleic acid (BNA)
  modified_base 5: mod_base = OTHER; note = bicyclic nucleic acid (BNA)
  modified_base 10: mod_base = OTHER; note = bicyclic nucleic acid (BNA)
  modified_base 17..18: mod_base = OTHER; note = bicyclic nucleic acid (BNA)
  modified_base 4: mod_base = OTHER; note = 5-methyl
  modified_base 13: mod_base = OTHER; note = 5-methyl
  modified_base 17..18: mod_base = OTHER; note = 5-methyl
  source 1..18: mol_type = other DNA
agtcggtaagttctgtcc

SEQ ID NO: 15815 - DNA, 18 bp, synthetic construct
  misc_feature 1..18: note = Description of Artificial Sequence: Synthetic Antisense oligonucleotide
  modified_base 1..2: mod_base = OTHER; note = bicyclic nucleic acid (BNA)
  modified_base 6: mod_base = OTHER; note = bicyclic nucleic acid (BNA)
  modified_base 13: mod_base = OTHER; note = bicyclic nucleic acid (BNA)
  modified_base 17..18: mod_base = OTHER; note = bicyclic nucleic acid (BNA)
  modified_base 4: mod_base = OTHER; note = 5-methyl
  modified_base 13: mod_base = OTHER; note = 5-methyl
  modified_base 17..18: mod_base = OTHER; note = 5-methyl
  source 1..18: mol_type = other DNA
agtcggtaagttctgtcc

SEQ ID NO: 15816 - DNA, 18 bp, synthetic construct
  misc_feature 1..18: note = Description of Artificial Sequence: Synthetic Antisense oligonucleotide
  modified_base 1..2: mod_base = OTHER; note = bicyclic nucleic acid (BNA)
  modified_base 10: mod_base = OTHER; note = bicyclic nucleic acid (BNA)
  modified_base 15: mod_base = OTHER; note = bicyclic nucleic acid (BNA)
  modified_base 17..18: mod_base = OTHER; note = bicyclic nucleic acid (BNA)
  modified_base 4: mod_base = OTHER; note = 5-methyl
  modified_base 13: mod_base = OTHER; note = 5-methyl
  modified_base 17..18: mod_base = OTHER; note = 5-methyl
  source 1..18: mol_type = other DNA
agtcggtaagttctgtcc

SEQ ID NO: 15817 - DNA, 18 bp, synthetic construct
  misc_feature 1..18: note = Description of Artificial Sequence: Synthetic Antisense oligonucleotide
  modified_base 1..2: mod_base = OTHER; note = bicyclic nucleic acid (BNA)
  modified_base 13: mod_base = OTHER; note = bicyclic nucleic acid (BNA)
  modified_base 15: mod_base = OTHER; note = bicyclic nucleic acid (BNA)
  modified_base 17..18: mod_base = OTHER; note = bicyclic nucleic acid (BNA)
  modified_base 4: mod_base = OTHER; note = 5-methyl
  modified_base 13: mod_base = OTHER; note = 5-methyl
  modified_base 17..18: mod_base = OTHER; note = 5-methyl
  source 1..18: mol_type = other DNA
agtcggtaagttctgtcc

SEQ ID NO: 15818 - DNA, 18 bp, synthetic construct
  misc_feature 1..18: note = Description of Artificial Sequence: Synthetic Antisense oligonucleotide
  modified_base 1..2: mod_base = OTHER; note = bicyclic nucleic acid (BNA)
  modified_base 5..6: mod_base = OTHER; note = bicyclic nucleic acid (BNA)
  modified_base 17..18: mod_base = OTHER; note = bicyclic nucleic acid (BNA)
  modified_base 4: mod_base = OTHER; note = 5-methyl
  modified_base 13: mod_base = OTHER; note = 5-methyl
  modified_base 17..18: mod_base = OTHER; note = 5-methyl
  source 1..18: mol_type = other DNA
agtcggtaagttctgtcc

SEQ ID NO: 15819 - DNA, 18 bp, synthetic construct
  misc_feature 1..18: note = Description of Artificial Sequence: Synthetic Antisense oligonucleotide
  modified_base 1..2: mod_base = OTHER; note = bicyclic nucleic acid (BNA)
  modified_base 5: mod_base = OTHER; note = bicyclic nucleic acid (BNA)
  modified_base 15: mod_base = OTHER; note = bicyclic nucleic acid (BNA)
  modified_base 17..18: mod_base = OTHER; note = bicyclic nucleic acid (BNA)
  modified_base 4: mod_base = OTHER; note = 5-methyl
  modified_base 13: mod_base = OTHER; note = 5-methyl
  modified_base 17..18: mod_base = OTHER; note = 5-methyl
  source 1..18: mol_type = other DNA
agtcggtaagttctgtcc

SEQ ID NO: 15820 - DNA, 18 bp, synthetic construct
  misc_feature 1..18: note = Description of Artificial Sequence: Synthetic Antisense oligonucleotide
  modified_base 1..2: mod_base = OTHER; note = bicyclic nucleic acid (BNA)
  modified_base 4: mod_base = OTHER; note = bicyclic nucleic acid (BNA)
  modified_base 10: mod_base = OTHER; note = bicyclic nucleic acid (BNA)
  modified_base 17..18: mod_base = OTHER; note = bicyclic nucleic acid (BNA)
  modified_base 4: mod_base = OTHER; note = 5-methyl
  modified_base 13: mod_base = OTHER; note = 5-methyl
  modified_base 17..18: mod_base = OTHER; note = 5-methyl
  source 1..18: mol_type = other DNA
agtcggtaagttctgtcc

SEQ ID NO: 15821 - DNA, 18 bp, synthetic construct
  misc_feature 1..18: note = Description of Artificial Sequence: Synthetic Antisense oligonucleotide
  modified_base 1..2: mod_base = OTHER; note = bicyclic nucleic acid (BNA)
  modified_base 4: mod_base = OTHER; note = bicyclic nucleic acid (BNA)
  modified_base 6: mod_base = OTHER; note = bicyclic nucleic acid (BNA)
  modified_base 17..18: mod_base = OTHER; note = bicyclic nucleic acid (BNA)
  modified_base 4: mod_base = OTHER; note = 5-methyl
  modified_base 13: mod_base = OTHER; note = 5-methyl
  modified_base 17..18: mod_base = OTHER; note = 5-methyl
  source 1..18: mol_type = other DNA
agtcggtaagttctgtcc

SEQ ID NO: 15822 - DNA, 18 bp, synthetic construct
  misc_feature 1..18: note = Description of Artificial Sequence: Synthetic Antisense oligonucleotide
  modified_base 1..2: mod_base = OTHER; note = bicyclic nucleic acid (BNA)
  modified_base 4: mod_base = OTHER; note = bicyclic nucleic acid (BNA)
  modified_base 13: mod_base = OTHER; note = bicyclic nucleic acid (BNA)
  modified_base 17..18: mod_base = OTHER; note = bicyclic nucleic acid (BNA)
  modified_base 4: mod_base = OTHER; note = 5-methyl
  modified_base 13: mod_base = OTHER; note = 5-methyl
  modified_base 17..18: mod_base = OTHER; note = 5-methyl
  source 1..18: mol_type = other DNA
agtcggtaagttctgtcc

SEQ ID NO: 15823 - DNA, 18 bp, synthetic construct
  misc_feature 1..18: note = Description of Artificial Sequence: Synthetic Antisense oligonucleotide
  modified_base 1..2: mod_base = OTHER; note = bicyclic nucleic acid (BNA)
  modified_base 6: mod_base = OTHER; note = bicyclic nucleic acid (BNA)
  modified_base 15: mod_base = OTHER; note = bicyclic nucleic acid (BNA)
  modified_base 17..18: mod_base = OTHER; note = bicyclic nucleic acid (BNA)
  modified_base 4: mod_base = OTHER; note = 5-methyl
  modified_base 13: mod_base = OTHER; note = 5-methyl
  modified_base 17..18: mod_base = OTHER; note = 5-methyl
  source 1..18: mol_type = other DNA
agtcggtaagttctgtcc

SEQ ID NO: 15824 - DNA, 18 bp, synthetic construct
  misc_feature 1..18: note = Description of Artificial Sequence: Synthetic Antisense oligonucleotide
  modified_base 1..2: mod_base = OTHER; note = bicyclic nucleic acid (BNA)
  modified_base 4..5: mod_base = OTHER; note = bicyclic nucleic acid (BNA)
  modified_base 17..18: mod_base = OTHER; note = bicyclic nucleic acid (BNA)
  modified_base 4: mod_base = OTHER; note = 5-methyl
  modified_base 13: mod_base = OTHER; note = 5-methyl
  modified_base 17..18: mod_base = OTHER; note = 5-methyl
  source 1..18: mol_type = other DNA
agtcggtaagttctgtcc

SEQ ID NO: 15825 - DNA, 18 bp, synthetic construct
  misc_feature 1..18: note = Description of Artificial Sequence: Synthetic Antisense oligonucleotide
  modified_base 1..2: mod_base = OTHER; note = bicyclic nucleic acid (BNA)
  modified_base 10: mod_base = OTHER; note = bicyclic nucleic acid (BNA)
  modified_base 13: mod_base = OTHER; note = bicyclic nucleic acid (BNA)
  modified_base 17..18: mod_base = OTHER; note = bicyclic nucleic acid (BNA)
  modified_base 4: mod_base = OTHER; note = 5-methyl
  modified_base 13: mod_base = OTHER; note = 5-methyl
  modified_base 17..18: mod_base = OTHER; note = 5-methyl
  source 1..18: mol_type = other DNA
agtcggtaagttctgtcc

SEQ ID NO: 15826 - DNA, 18 bp, synthetic construct
  misc_feature 1..18: note = Description of Artificial Sequence: Synthetic Antisense oligonucleotide
  modified_base 1: mod_base = OTHER; note = 5-methyl
  modified_base 5..6: mod_base = OTHER; note = 5-methyl
  modified_base 10..12: mod_base = OTHER; note = 5-methyl
  modified_base 1..2: mod_base = OTHER; note = bicyclic nucleic acid (BNA)
  modified_base 6: mod_base = OTHER; note = bicyclic nucleic acid (BNA)
  modified_base 10: mod_base = OTHER; note = bicyclic nucleic acid (BNA)
  modified_base 17..18: mod_base = OTHER; note = bicyclic nucleic acid (BNA)
  source 1..18: mol_type = other DNA
ctgtccaagcccggttga

SEQ ID NO: 15827 - DNA, 18 bp, synthetic construct
  misc_feature 1..18: note = Description of Artificial Sequence: Synthetic Antisense oligonucleotide
  modified_base 1: mod_base = OTHER; note = 5-methyl
  modified_base 5..6: mod_base = OTHER; note = 5-methyl
  modified_base 10..12: mod_base = OTHER; note = 5-methyl
  modified_base 1..2: mod_base = OTHER; note = bicyclic nucleic acid (BNA)
  modified_base 9: mod_base = OTHER; note = bicyclic nucleic acid (BNA)
  modified_base 14: mod_base = OTHER; note = bicyclic nucleic acid (BNA)
  modified_base 17..18: mod_base = OTHER; note = bicyclic nucleic acid (BNA)
  source 1..18: mol_type = other DNA
ctgtccaagcccggttga

SEQ ID NO: 15828 - DNA, 18 bp, synthetic construct
  misc_feature 1..18: note = Description of Artificial Sequence: Synthetic Antisense oligonucleotide
  modified_base 1: mod_base = OTHER; note = 5-methyl
  modified_base 5..6: mod_base = OTHER; note = 5-methyl
  modified_base 10..12: mod_base = OTHER; note = 5-methyl
  modified_base 1..2: mod_base = OTHER; note = bicyclic nucleic acid (BNA)
  modified_base 11..12: mod_base = OTHER; note = bicyclic nucleic acid (BNA)
  modified_base 17..18: mod_base = OTHER; note = bicyclic nucleic acid (BNA)
  source 1..18: mol_type = other DNA
ctgtccaagcccggttga

SEQ ID NO: 15829 - DNA, 18 bp, synthetic construct
  misc_feature 1..18: note = Description of Artificial Sequence: Synthetic Antisense oligonucleotide
  modified_base 1: mod_base = OTHER; note = 5-methyl
  modified_base 5..6: mod_base = OTHER; note = 5-methyl
  modified_base 10..12: mod_base = OTHER; note = 5-methyl
  modified_base 1..2: mod_base = OTHER; note = bicyclic nucleic acid (BNA)
  modified_base 5: mod_base = OTHER; note = bicyclic nucleic acid (BNA)
  modified_base 9: mod_base = OTHER; note = bicyclic nucleic acid (BNA)
  modified_base 17..18: mod_base = OTHER; note = bicyclic nucleic acid (BNA)
  source 1..18: mol_type = other DNA
ctgtccaagcccggttga

SEQ ID NO: 15830 - DNA, 18 bp, synthetic construct
  misc_feature 1..18: note = Description of Artificial Sequence: Synthetic Antisense oligonucleotide
  modified_base 1: mod_base = OTHER; note = 5-methyl
  modified_base 5..6: mod_base = OTHER; note = 5-methyl
  modified_base 10..12: mod_base = OTHER; note = 5-methyl
  modified_base 1..3: mod_base = OTHER; note = bicyclic nucleic acid (BNA)
  modified_base 9: mod_base = OTHER; note = bicyclic nucleic acid (BNA)
  modified_base 17..18: mod_base = OTHER; note = bicyclic nucleic acid (BNA)
  source 1..18: mol_type = other DNA
ctgtccaagcccggttga

SEQ ID NO: 15831 - DNA, 18 bp, synthetic construct
  misc_feature 1..18: note = Description of Artificial Sequence: Synthetic Antisense oligonucleotide
  modified_base 1: mod_base = OTHER; note = 5-methyl
  modified_base 5..6: mod_base = OTHER; note = 5-methyl
  modified_base 10..12: mod_base = OTHER; note = 5-methyl
  modified_base 1..2: mod_base = OTHER; note = bicyclic nucleic acid (BNA)
  modified_base 6: mod_base = OTHER; note = bicyclic nucleic acid (BNA)
  modified_base 14: mod_base = OTHER; note = bicyclic nucleic acid (BNA)
  modified_base 17..18: mod_base = OTHER; note = bicyclic nucleic acid (BNA)
  source 1..18: mol_type = other DNA
ctgtccaagcccggttga

SEQ ID NO: 15832 - DNA, 18 bp, synthetic construct
  misc_feature 1..18: note = Description of Artificial Sequence: Synthetic Antisense oligonucleotide
  modified_base 1: mod_base = OTHER; note = 5-methyl
  modified_base 5..6: mod_base = OTHER; note = 5-methyl
  modified_base 10..12: mod_base = OTHER; note = 5-methyl
  modified_base 1..2: mod_base = OTHER; note = bicyclic nucleic acid (BNA)
  modified_base 9..10: mod_base = OTHER; note = bicyclic nucleic acid (BNA)
  modified_base 17..18: mod_base = OTHER; note = bicyclic nucleic acid (BNA)
  source 1..18: mol_type = other DNA
ctgtccaagcccggttga

SEQ ID NO: 15833 - DNA, 18 bp, synthetic construct
  misc_feature 1..18: note = Description of Artificial Sequence: Synthetic Antisense oligonucleotide
  modified_base 1: mod_base = OTHER; note = 5-methyl
  modified_base 5..6: mod_base = OTHER; note = 5-methyl
  modified_base 10..12: mod_base = OTHER; note = 5-methyl
  modified_base 1..2: mod_base = OTHER; note = bicyclic nucleic acid (BNA)
  modified_base 5: mod_base = OTHER; note = bicyclic nucleic acid (BNA)
  modified_base 13: mod_base = OTHER; note = bicyclic nucleic acid (BNA)
  modified_base 17..18: mod_base = OTHER; note = bicyclic nucleic acid (BNA)
  source 1..18: mol_type = other DNA
ctgtccaagcccggttga

SEQ ID NO: 15834 - DNA, 18 bp, synthetic construct
  misc_feature 1..18: note = Description of Artificial Sequence: Synthetic Antisense oligonucleotide
  modified_base 1: mod_base = OTHER; note = 5-methyl
  modified_base 5..6: mod_base = OTHER; note = 5-methyl
  modified_base 10..12: mod_base = OTHER; note = 5-methyl
  modified_base 1..3: mod_base = OTHER; note = bicyclic nucleic acid (BNA)
  modified_base 13: mod_base = OTHER; note = bicyclic nucleic acid (BNA)
  modified_base 17..18: mod_base = OTHER; note = bicyclic nucleic acid (BNA)
  source 1..18: mol_type = other DNA
ctgtccaagcccggttga

SEQ ID NO: 15835 - DNA, 18 bp, synthetic construct
  misc_feature 1..18: note = Description of Artificial Sequence: Synthetic Antisense oligonucleotide
  modified_base 1: mod_base = OTHER; note = 5-methyl
  modified_base 5..6: mod_base = OTHER; note = 5-methyl
  modified_base 10..12: mod_base = OTHER; note = 5-methyl
  modified_base 1..3: mod_base = OTHER; note = bicyclic nucleic acid (BNA)
  modified_base 6: mod_base = OTHER; note = bicyclic nucleic acid (BNA)
  modified_base 17..18: mod_base = OTHER; note = bicyclic nucleic acid (BNA)
  source 1..18: mol_type = other DNA
ctgtccaagcccggttga

SEQ ID NO: 15836 - DNA, 18 bp, synthetic construct
  misc_feature 1..18: note = Description of Artificial Sequence: Synthetic Antisense oligonucleotide
  modified_base 1: mod_base = OTHER; note = 5-methyl
  modified_base 5..6: mod_base = OTHER; note = 5-methyl
  modified_base 10..12: mod_base = OTHER; note = 5-methyl
  modified_base 1..2: mod_base = OTHER; note = bicyclic nucleic acid (BNA)
  modified_base 6: mod_base = OTHER; note = bicyclic nucleic acid (BNA)
  modified_base 9: mod_base = OTHER; note = bicyclic nucleic acid (BNA)
  modified_base 17..18: mod_base = OTHER; note = bicyclic nucleic acid (BNA)
  source 1..18: mol_type = other DNA
ctgtccaagcccggttga

SEQ ID NO: 15837 - DNA, 18 bp, synthetic construct
  misc_feature 1..18: note = Description of Artificial Sequence: Synthetic Antisense oligonucleotide
  modified_base 1: mod_base = OTHER; note = 5-methyl
  modified_base 5..6: mod_base = OTHER; note = 5-methyl
  modified_base 10..12: mod_base = OTHER; note = 5-methyl
  modified_base 1..2: mod_base = OTHER; note = bicyclic nucleic acid (BNA)
  modified_base 5: mod_base = OTHER; note = bicyclic nucleic acid (BNA)
  modified_base 10: mod_base = OTHER; note = bicyclic nucleic acid (BNA)
  modified_base 17..18: mod_base = OTHER; note = bicyclic nucleic acid (BNA)
  source 1..18: mol_type = other DNA
ctgtccaagcccggttga

SEQ ID NO: 15838 - DNA, 18 bp, synthetic construct
  misc_feature 1..18: note = Description of Artificial Sequence: Synthetic Antisense oligonucleotide
  modified_base 1: mod_base = OTHER; note = 5-methyl
  modified_base 5..6: mod_base = OTHER; note = 5-methyl
  modified_base 10..12: mod_base = OTHER; note = 5-methyl
  modified_base 1..3: mod_base = OTHER; note = bicyclic nucleic acid (BNA)
  modified_base 10: mod_base = OTHER; note = bicyclic nucleic acid (BNA)
  modified_base 17..18: mod_base = OTHER; note = bicyclic nucleic acid (BNA)
  source 1..18: mol_type = other DNA
ctgtccaagcccggttga

SEQ ID NO: 15839 - DNA, 18 bp, synthetic construct
  misc_feature 1..18: note = Description of Artificial Sequence: Synthetic Antisense oligonucleotide
  modified_base 1: mod_base = OTHER; note = 5-methyl
  modified_base 5..6: mod_base = OTHER; note = 5-methyl
  modified_base 10..12: mod_base = OTHER; note = 5-methyl
  modified_base 1..2: mod_base = OTHER; note = bicyclic nucleic acid (BNA)
  modified_base 13..14: mod_base = OTHER; note = bicyclic nucleic acid (BNA)
  modified_base 17..18: mod_base = OTHER; note = bicyclic nucleic acid (BNA)
  source 1..18: mol_type = other DNA
ctgtccaagcccggttga

SEQ ID NO: 15840 - DNA, 18 bp, synthetic construct
  misc_feature 1..18: note = Description of Artificial Sequence: Synthetic Antisense oligonucleotide
  modified_base 1: mod_base = OTHER; note = 5-methyl
  modified_base 5..6: mod_base = OTHER; note = 5-methyl
  modified_base 10..12: mod_base = OTHER; note = 5-methyl
  modified_base 1..2: mod_base = OTHER; note = bicyclic nucleic acid (BNA)
  modified_base 6: mod_base = OTHER; note = bicyclic nucleic acid (BNA)
  modified_base 13: mod_base = OTHER; note = bicyclic nucleic acid (BNA)
  modified_base 17..18: mod_base = OTHER; note = bicyclic nucleic acid (BNA)
  source 1..18: mol_type = other DNA
ctgtccaagcccggttga

SEQ ID NO: 15841 - DNA, 18 bp, synthetic construct
  misc_feature 1..18: note = Description of Artificial Sequence: Synthetic Antisense oligonucleotide
  modified_base 1: mod_base = OTHER; note = 5-methyl
  modified_base 5..6: mod_base = OTHER; note = 5-methyl
  modified_base 10..12: mod_base = OTHER; note = 5-methyl
  modified_base 1..2: mod_base = OTHER; note = bicyclic nucleic acid (BNA)
  modified_base 9: mod_base = OTHER; note = bicyclic nucleic acid (BNA)
  modified_base 11: mod_base = OTHER; note = bicyclic nucleic acid (BNA)
  modified_base 17..18: mod_base = OTHER; note = bicyclic nucleic acid (BNA)
  source 1..18: mol_type = other DNA
ctgtccaagcccggttga

SEQ ID NO: 15842 - DNA, 18 bp, synthetic construct
  misc_feature 1..18: note = Description of Artificial Sequence: Synthetic Antisense oligonucleotide
  modified_base 1: mod_base = OTHER; note = 5-methyl
  modified_base 5..6: mod_base = OTHER; note = 5-methyl
  modified_base 10..12: mod_base = OTHER; note = 5-methyl
  modified_base 1..2: mod_base = OTHER; note = bicyclic nucleic acid (BNA)
  modified_base 11: mod_base = OTHER; note = bicyclic nucleic acid (BNA)
  modified_base 13: mod_base = OTHER; note = bicyclic nucleic acid (BNA)
  modified_base 17..18: mod_base = OTHER; note = bicyclic nucleic acid (BNA)
  source 1..18: mol_type = other DNA
ctgtccaagcccggttga

SEQ ID NO: 15843 - DNA, 18 bp, synthetic construct
  misc_feature 1..18: note = Description of Artificial Sequence: Synthetic Antisense oligonucleotide
  modified_base 1: mod_base = OTHER; note = 5-methyl
  modified_base 5..6: mod_base = OTHER; note = 5-methyl
  modified_base 10..12: mod_base = OTHER; note = 5-methyl
  modified_base 1..2: mod_base = OTHER; note = bicyclic nucleic acid (BNA)
  modified_base 5: mod_base = OTHER; note = bicyclic nucleic acid (BNA)
  modified_base 14: mod_base = OTHER; note = bicyclic nucleic acid (BNA)
  modified_base 17..18: mod_base = OTHER; note = bicyclic nucleic acid (BNA)
  source 1..18: mol_type = other DNA
ctgtccaagcccggttga

SEQ ID NO: 15844 - DNA, 18 bp, synthetic construct
  misc_feature 1..18: note = Description of Artificial Sequence: Synthetic Antisense oligonucleotide
  modified_base 1: mod_base = OTHER; note = 5-methyl
  modified_base 5..6: mod_base = OTHER; note = 5-methyl
  modified_base 10..12: mod_base = OTHER; note = 5-methyl
  modified_base 1..3: mod_base = OTHER; note = bicyclic nucleic acid (BNA)
  modified_base 14: mod_base = OTHER; note = bicyclic nucleic acid (BNA)
  modified_base 17..18: mod_base = OTHER; note = bicyclic nucleic acid (BNA)
  source 1..18: mol_type = other DNA
ctgtccaagcccggttga

SEQ ID NO: 15845 - DNA, 18 bp, synthetic construct
  misc_feature 1..18: note = Description of Artificial Sequence: Synthetic Antisense oligonucleotide
  modified_base 1: mod_base = OTHER; note = 5-methyl
  modified_base 5..6: mod_base = OTHER; note = 5-methyl
  modified_base 10..12: mod_base = OTHER; note = 5-methyl
  modified_base 1..2: mod_base = OTHER; note = bicyclic nucleic acid (BNA)
  modified_base 10: mod_base = OTHER; note = bicyclic nucleic acid (BNA)
  modified_base 12: mod_base = OTHER; note = bicyclic nucleic acid (BNA)
  modified_base 17..18: mod_base = OTHER; note = bicyclic nucleic acid (BNA)
  source 1..18: mol_type = other DNA
ctgtccaagcccggttga

SEQ ID NO: 15846 - DNA, 18 bp, synthetic construct
  misc_feature 1..18: note = Description of Artificial Sequence: Synthetic Antisense oligonucleotide
  modified_base 1: mod_base = OTHER; note = 5-methyl
  modified_base 5..6: mod_base = OTHER; note = 5-methyl
  modified_base 10..12: mod_base = OTHER; note = 5-methyl
  modified_base 1..2: mod_base = OTHER; note = bicyclic nucleic acid (BNA)
  modified_base 12: mod_base = OTHER; note = bicyclic nucleic acid (BNA)
  modified_base 14: mod_base = OTHER; note = bicyclic nucleic acid (BNA)
  modified_base 17..18: mod_base = OTHER; note = bicyclic nucleic acid (BNA)
  source 1..18: mol_type = other DNA
ctgtccaagcccggttga

SEQ ID NO: 15847 - DNA, 18 bp, synthetic construct
  misc_feature 1..18: note = Description of Artificial Sequence: Synthetic Antisense oligonucleotide
  modified_base 1: mod_base = OTHER; note = 5-methyl
  modified_base 5..6: mod_base = OTHER; note = 5-methyl
  modified_base 10..12: mod_base = OTHER; note = 5-methyl
  modified_base 1..2: mod_base = OTHER; note = bicyclic nucleic acid (BNA)
  modified_base 5: mod_base = OTHER; note = bicyclic nucleic acid (BNA)
  modified_base 11: mod_base = OTHER; note = bicyclic nucleic acid (BNA)
  modified_base 17..18: mod_base = OTHER; note = bicyclic nucleic acid (BNA)
  source 1..18: mol_type = other DNA
ctgtccaagcccggttga

SEQ ID NO: 15848 - DNA, 18 bp, synthetic construct
  misc_feature 1..18: note = Description of Artificial Sequence: Synthetic Antisense oligonucleotide
  modified_base 1: mod_base = OTHER; note = 5-methyl
  modified_base 5..6: mod_base = OTHER; note = 5-methyl
  modified_base 10..12: mod_base = OTHER; note = 5-methyl
  modified_base 1..2: mod_base = OTHER; note = bicyclic nucleic acid (BNA)
  modified_base 6: mod_base = OTHER; note = bicyclic nucleic acid (BNA)
  modified_base 12: mod_base = OTHER; note = bicyclic nucleic acid (BNA)
  modified_base 17..18: mod_base = OTHER; note = bicyclic nucleic acid (BNA)
  source 1..18: mol_type = other DNA
ctgtccaagcccggttga

SEQ ID NO: 15849 - DNA, 18 bp, synthetic construct
  misc_feature 1..18: note = Description of Artificial Sequence: Synthetic Antisense oligonucleotide
  modified_base 1: mod_base = OTHER; note = 5-methyl
  modified_base 5..6: mod_base = OTHER; note = 5-methyl
  modified_base 10..12: mod_base = OTHER; note = 5-methyl
  modified_base 1..2: mod_base = OTHER; note = bicyclic nucleic acid (BNA)
  modified_base 5..6: mod_base = OTHER; note = bicyclic nucleic acid (BNA)
  modified_base 17..18: mod_base = OTHER; note = bicyclic nucleic acid (BNA)
  source 1..18: mol_type = other DNA
ctgtccaagcccggttga

SEQ ID NO: 15850 - DNA, 18 bp, synthetic construct
  misc_feature 1..18: note = Description of Artificial Sequence: Synthetic Antisense oligonucleotide
  modified_base 1: mod_base = OTHER; note = 5-methyl
  modified_base 5..6: mod_base = OTHER; note = 5-methyl
  modified_base 10..12: mod_base = OTHER; note = 5-methyl
  modified_base 1..2: mod_base = OTHER; note = bicyclic nucleic acid (BNA)
  modified_base 11: mod_base = OTHER; note = bicyclic nucleic acid (BNA)
  modified_base 14: mod_base = OTHER; note = bicyclic nucleic acid (BNA)
  modified_base 17..18: mod_base = OTHER; note = bicyclic nucleic acid (BNA)
  source 1..18: mol_type = other DNA
ctgtccaagcccggttga

SEQ ID NO: 15851 - DNA, 18 bp, synthetic construct
  misc_feature 1..18: note = Description of Artificial Sequence: Synthetic Antisense oligonucleotide
  modified_base 1: mod_base = OTHER; note = 5-methyl
  modified_base 5..6: mod_base = OTHER; note = 5-methyl
  modified_base 10..12: mod_base = OTHER; note = 5-methyl
  modified_base 1..2: mod_base = OTHER; note = bicyclic nucleic acid (BNA)
  modified_base 9: mod_base = OTHER; note = bicyclic nucleic acid (BNA)
  modified_base 12: mod_base = OTHER; note = bicyclic nucleic acid (BNA)
  modified_base 17..18: mod_base = OTHER; note = bicyclic nucleic acid (BNA)
  source 1..18: mol_type = other DNA
ctgtccaagcccggttga

SEQ ID NO: 15852 - DNA, 18 bp, synthetic construct
  misc_feature 1..18: note = Description of Artificial Sequence: Synthetic Antisense oligonucleotide
  modified_base 1: mod_base = OTHER; note = 5-methyl
  modified_base 5..6: mod_base = OTHER; note = 5-methyl
  modified_base 10..12: mod_base = OTHER; note = 5-methyl
  modified_base 1..3: mod_base = OTHER; note = bicyclic nucleic acid (BNA)
  modified_base 11: mod_base = OTHER; note = bicyclic nucleic acid (BNA)
  modified_base 17..18: mod_base = OTHER; note = bicyclic nucleic acid (BNA)
  source 1..18: mol_type = other DNA
ctgtccaagcccggttga

SEQ ID NO: 15853 - DNA, 18 bp, synthetic construct
  misc_feature 1..18: note = Description of Artificial Sequence: Synthetic Antisense oligonucleotide
  modified_base 1: mod_base = OTHER; note = 5-methyl
  modified_base 5..6: mod_base = OTHER; note = 5-methyl
  modified_base 10..12: mod_base = OTHER; note = 5-methyl
  modified_base 1..2: mod_base = OTHER; note = bicyclic nucleic acid (BNA)
  modified_base 10..11: mod_base = OTHER; note = bicyclic nucleic acid (BNA)
  modified_base 17..18: mod_base = OTHER; note = bicyclic nucleic acid (BNA)
  source 1..18: mol_type = other DNA
ctgtccaagcccggttga

SEQ ID NO: 15854 - DNA, 18 bp, synthetic construct
  misc_feature 1..18: note = Description of Artificial Sequence: Synthetic Antisense oligonucleotide
  modified_base 1: mod_base = OTHER; note = 5-methyl
  modified_base 5..6: mod_base = OTHER; note = 5-methyl
  modified_base 10..12: mod_base = OTHER; note = 5-methyl
  modified_base 1..2: mod_base = OTHER; note = bicyclic nucleic acid (BNA)
  modified_base 12..13: mod_base = OTHER; note = bicyclic nucleic acid (BNA)
  modified_base 17..18: mod_base = OTHER; note = bicyclic nucleic acid (BNA)
  source 1..18: mol_type = other DNA
ctgtccaagcccggttga

SEQ ID NO: 15855 - DNA, 18 bp, synthetic construct
  misc_feature 1..18: note = Description of Artificial Sequence: Synthetic Antisense oligonucleotide
  modified_base 1: mod_base = OTHER; note = 5-methyl
  modified_base 5..6: mod_base = OTHER; note = 5-methyl
  modified_base 10..12: mod_base = OTHER; note = 5-methyl
  modified_base 1..2: mod_base = OTHER; note = bicyclic nucleic acid (BNA)
  modified_base 5: mod_base = OTHER; note = bicyclic nucleic acid (BNA)
  modified_base 12: mod_base = OTHER; note = bicyclic nucleic acid (BNA)
  modified_base 17..18: mod_base = OTHER; note = bicyclic nucleic acid (BNA)
  source 1..18: mol_type = other DNA
ctgtccaagcccggttga

SEQ ID NO: 15856 - DNA, 18 bp, synthetic construct
  misc_feature 1..18: note = Description of Artificial Sequence: Synthetic Antisense oligonucleotide
  modified_base 1: mod_base = OTHER; note = 5-methyl
  modified_base 5..6: mod_base = OTHER; note = 5-methyl
  modified_base 10..12: mod_base = OTHER; note = 5-methyl
  modified_base 1..2: mod_base = OTHER; note = bicyclic nucleic acid (BNA)
  modified_base 10: mod_base = OTHER; note = bicyclic nucleic acid (BNA)
  modified_base 14: mod_base = OTHER; note = bicyclic nucleic acid (BNA)
  modified_base 17..18: mod_base = OTHER; note = bicyclic nucleic acid (BNA)
  source 1..18: mol_type = other DNA
ctgtccaagcccggttga

SEQ ID NO: 15857 - DNA, 18 bp, synthetic construct
  misc_feature 1..18: note = Description of Artificial Sequence: Synthetic Antisense oligonucleotide
  modified_base 1: mod_base = OTHER; note = 5-methyl
  modified_base 5..6: mod_base = OTHER; note = 5-methyl
  modified_base 10..12: mod_base = OTHER; note = 5-methyl
  modified_base 1..2: mod_base = OTHER; note = bicyclic nucleic acid (BNA)
  modified_base 6: mod_base = OTHER; note = bicyclic nucleic acid (BNA)
  modified_base 11: mod_base = OTHER; note = bicyclic nucleic acid (BNA)
  modified_base 17..18: mod_base = OTHER; note = bicyclic nucleic acid (BNA)
  source 1..18: mol_type = other DNA
ctgtccaagcccggttga

SEQ ID NO: 15858 - DNA, 18 bp, synthetic construct
  misc_feature 1..18: note = Description of Artificial Sequence: Synthetic Antisense oligonucleotide
  modified_base 1: mod_base = OTHER; note = 5-methyl
  modified_base 5..6: mod_base = OTHER; note = 5-methyl
  modified_base 10..12: mod_base = OTHER; note = 5-methyl
  modified_base 1..2: mod_base = OTHER; note = bicyclic nucleic acid (BNA)
  modified_base 9: mod_base = OTHER; note = bicyclic nucleic acid (BNA)
  modified_base 13: mod_base = OTHER; note = bicyclic nucleic acid (BNA)
  modified_base 17..18: mod_base = OTHER; note = bicyclic nucleic acid (BNA)
  source 1..18: mol_type = other DNA
ctgtccaagcccggttga

SEQ ID NO: 15859 - DNA, 18 bp, synthetic construct
  misc_feature 1..18: note = Description of Artificial Sequence: Synthetic Antisense oligonucleotide
  modified_base 1: mod_base = OTHER; note = 5-methyl
  modified_base 5..6: mod_base = OTHER; note = 5-methyl
  modified_base 10..12: mod_base = OTHER; note = 5-methyl
  modified_base 1..3: mod_base = OTHER; note = bicyclic nucleic acid (BNA)
  modified_base 12: mod_base = OTHER; note = bicyclic nucleic acid (BNA)
  modified_base 17..18: mod_base = OTHER; note = bicyclic nucleic acid (BNA)
  source 1..18: mol_type = other DNA
ctgtccaagcccggttga

SEQ ID NO: 15860 - DNA, 18 bp, synthetic construct
  misc_feature 1..18: note = Description of Artificial Sequence: Synthetic Antisense oligonucleotide
  modified_base 1: mod_base = OTHER; note = 5-methyl
  modified_base 5..6: mod_base = OTHER; note = 5-methyl
  modified_base 10..12: mod_base = OTHER; note = 5-methyl
  modified_base 1..3: mod_base = OTHER; note = bicyclic nucleic acid (BNA)
  modified_base 5: mod_base = OTHER; note = bicyclic nucleic acid (BNA)
  modified_base 17..18: mod_base = OTHER; note = bicyclic nucleic acid (BNA)
  source 1..18: mol_type = other DNA
ctgtccaagcccggttga

SEQ ID NO: 15861 - DNA, 18 bp, synthetic construct
  misc_feature 1..18: note = Description of Artificial Sequence: Synthetic Antisense oligonucleotide
  modified_base 1: mod_base = OTHER; note = 5-methyl
  modified_base 5..6: mod_base = OTHER; note = 5-methyl
  modified_base 10..12: mod_base = OTHER; note = 5-methyl
  modified_base 1..2: mod_base = OTHER; note = bicyclic nucleic acid (BNA)
  modified_base 10: mod_base = OTHER; note = bicyclic nucleic acid (BNA)
  modified_base 13: mod_base = OTHER; note = bicyclic nucleic acid (BNA)
  modified_base 17..18: mod_base = OTHER; note = bicyclic nucleic acid (BNA)
  source 1..18: mol_type = other DNA
ctgtccaagcccggttga

SEQ ID NO: 15862 - DNA, 20 bp, synthetic construct
  misc_feature 1..20: note = Description of Artificial Sequence: Synthetic Antisense oligonucleotide
  modified_base 1..2: mod_base = OTHER; note = bicyclic nucleic acid (BNA)
  modified_base 9: mod_base = OTHER; note = bicyclic nucleic acid (BNA)
  modified_base 19..20: mod_base = OTHER; note = bicyclic nucleic acid (BNA)
  modified_base 2: mod_base = OTHER; note = 5-methyl
  modified_base 14: mod_base = OTHER; note = 5-methyl
  modified_base 19: mod_base = OTHER; note = 5-methyl
  source 1..20: mol_type = other DNA
tcaaggaagatggcatttct

SEQ ID NO: 15863 - DNA, 20 bp, synthetic construct
  misc_feature 1..20: note = Description of Artificial Sequence: Synthetic Antisense oligonucleotide
  modified_base 1..2: mod_base = OTHER; note = bicyclic nucleic acid (BNA)
  modified_base 5: mod_base = OTHER; note = bicyclic nucleic acid (BNA)
  modified_base 19..20: mod_base = OTHER; note = bicyclic nucleic acid (BNA)
  modified_base 2: mod_base = OTHER; note = 5-methyl
  modified_base 14: mod_base = OTHER; note = 5-methyl
  modified_base 19: mod_base = OTHER; note = 5-methyl
  source 1..20: mol_type = other DNA
tcaaggaagatggcatttct

SEQ ID NO: 15864 - DNA, 20 bp, synthetic construct
  misc_feature 1..20: note = Description of Artificial Sequence: Synthetic Antisense oligonucleotide
  modified_base 1..2: mod_base = OTHER; note = bicyclic nucleic acid (BNA)
  modified_base 6: mod_base = OTHER; note = bicyclic nucleic acid (BNA)
  modified_base 19..20: mod_base = OTHER; note = bicyclic nucleic acid (BNA)
  modified_base 2: mod_base = OTHER; note = 5-methyl
  modified_base 14: mod_base = OTHER; note = 5-methyl
  modified_base 19: mod_base = OTHER; note = 5-methyl
  source 1..20: mol_type = other DNA
tcaaggaagatggcatttct

SEQ ID NO: 15865 - DNA, 20 bp, synthetic construct
  misc_feature 1..20: note = Description of Artificial Sequence: Synthetic Antisense oligonucleotide
  modified_base 1..2: mod_base = OTHER; note = bicyclic nucleic acid (BNA)
  modified_base 12: mod_base = OTHER; note = bicyclic nucleic acid (BNA)
  modified_base 19..20: mod_base = OTHER; note = bicyclic nucleic acid (BNA)
  modified_base 2: mod_base = OTHER; note = 5-methyl
  modified_base 14: mod_base = OTHER; note = 5-methyl
  modified_base 19: mod_base = OTHER; note = 5-methyl
  source 1..20: mol_type = other DNA
tcaaggaagatggcatttct

SEQ ID NO: 15866 - DNA, 20 bp, synthetic construct
  misc_feature 1..20: note = Description of Artificial Sequence: Synthetic Antisense oligonucleotide
  modified_base 1..2: mod_base = OTHER; note = bicyclic nucleic acid (BNA)
  modified_base 13: mod_base = OTHER; note = bicyclic nucleic acid (BNA)
  modified_base 19..20: mod_base = OTHER; note = bicyclic nucleic acid (BNA)
  modified_base 2: mod_base = OTHER; note = 5-methyl
  modified_base 14: mod_base = OTHER; note = 5-methyl
  modified_base 19: mod_base = OTHER; note = 5-methyl
  source 1..20: mol_type = other DNA
tcaaggaagatggcatttct

SEQ ID NO: 15867 - DNA, 20 bp, synthetic construct
  misc_feature 1..20: note = Description of Artificial Sequence: Synthetic Antisense oligonucleotide
  modified_base 1..2: mod_base = OTHER; note = bicyclic nucleic acid (BNA)
  modified_base 14: mod_base = OTHER; note = bicyclic nucleic acid (BNA)
  modified_base 19..20: mod_base = OTHER; note = bicyclic nucleic acid (BNA)
  modified_base 2: mod_base = OTHER; note = 5-methyl
  modified_base 14: mod_base = OTHER; note = 5-methyl
  modified_base 19: mod_base = OTHER; note = 5-methyl
  source 1..20: mol_type = other DNA
tcaaggaagatggcatttct

SEQ ID NO: 15868 - DNA, 22 bp, synthetic construct
  misc_feature 1..22: note = Description of Artificial Sequence: Synthetic Antisense oligonucleotide
  modified_base 1..2: mod_base = OTHER; note = bicyclic nucleic acid (BNA)
  modified_base 9: mod_base = OTHER; note = bicyclic nucleic acid (BNA)
  modified_base 21..22: mod_base = OTHER; note = bicyclic nucleic acid (BNA)
  modified_base 2: mod_base = OTHER; note = 5-methyl
  modified_base 14: mod_base = OTHER; note = 5-methyl
  modified_base 19: mod_base = OTHER; note = 5-methyl
  source 1..22: mol_type = other DNA
tcaaggaagatggcatttctag

SEQ ID NO: 15869 - DNA, 22 bp, synthetic construct
  misc_feature 1..22: note = Description of Artificial Sequence: Synthetic Antisense oligonucleotide
  modified_base 1..2: mod_base = OTHER; note = bicyclic nucleic acid (BNA)
  modified_base 5: mod_base = OTHER; note = bicyclic nucleic acid (BNA)
  modified_base 21..22: mod_base = OTHER; note = bicyclic nucleic acid (BNA)
  modified_base 2: mod_base = OTHER; note = 5-methyl
  modified_base 14: mod_base = OTHER; note = 5-methyl
  modified_base 19: mod_base = OTHER; note = 5-methyl
  source 1..22: mol_type = other DNA
tcaaggaagatggcatttctag

SEQ ID NO: 15870 - DNA, 22 bp, synthetic construct
  misc_feature 1..22: note = Description of Artificial Sequence: Synthetic Antisense oligonucleotide
  modified_base 1..2: mod_base = OTHER; note = bicyclic nucleic acid (BNA)
  modified_base 6: mod_base = OTHER; note = bicyclic nucleic acid (BNA)
  modified_base 21..22: mod_base = OTHER; note = bicyclic nucleic acid (BNA)
  modified_base 2: mod_base = OTHER; note = 5-methyl
  modified_base 14: mod_base = OTHER; note = 5-methyl
  modified_base 19: mod_base = OTHER; note = 5-methyl
  source 1..22: mol_type = other DNA
tcaaggaagatggcatttctag

SEQ ID NO: 15871 - DNA, 22 bp, synthetic construct
  misc_feature 1..22: note = Description of Artificial Sequence: Synthetic Antisense oligonucleotide
  modified_base 1..2: mod_base = OTHER; note = bicyclic nucleic acid (BNA)
  modified_base 12: mod_base = OTHER; note = bicyclic nucleic acid (BNA)
  modified_base 21..22: mod_base = OTHER; note = bicyclic nucleic acid (BNA)
  modified_base 2: mod_base = OTHER; note = 5-methyl
  modified_base 14: mod_base = OTHER; note = 5-methyl
  modified_base 19: mod_base = OTHER; note = 5-methyl
  source 1..22: mol_type = other DNA
tcaaggaagatggcatttctag

SEQ ID NO: 15872 - DNA, 22 bp, synthetic construct
  misc_feature 1..22: note = Description of Artificial Sequence: Synthetic Antisense oligonucleotide
  modified_base 1..2: mod_base = OTHER; note = bicyclic nucleic acid (BNA)
  modified_base 13: mod_base = OTHER; note = bicyclic nucleic acid (BNA)
  modified_base 21..22: mod_base = OTHER; note = bicyclic nucleic acid (BNA)
  modified_base 2: mod_base = OTHER; note = 5-methyl
  modified_base 14: mod_base = OTHER; note = 5-methyl
  modified_base 19: mod_base = OTHER; note = 5-methyl
  source 1..22: mol_type = other DNA
tcaaggaagatggcatttctag

SEQ ID NO: 15873 - DNA, 22 bp, synthetic construct
  misc_feature 1..22: note = Description of Artificial Sequence: Synthetic Antisense oligonucleotide
  modified_base 1..2: mod_base = OTHER; note = bicyclic nucleic acid (BNA)
  modified_base 19: mod_base = OTHER; note = bicyclic nucleic acid (BNA)
  modified_base 21..22: mod_base = OTHER; note = bicyclic nucleic acid (BNA)
  modified_base 2: mod_base = OTHER; note = 5-methyl
  modified_base 14: mod_base = OTHER; note = 5-methyl
  modified_base 19: mod_base = OTHER; note = 5-methyl
  source 1..22: mol_type = other DNA
tcaaggaagatggcatttctag

SEQ ID NO: 15874 - DNA, 22 bp, synthetic construct
  misc_feature 1..22: note = Description of Artificial Sequence: Synthetic Antisense oligonucleotide
  modified_base 1..2: mod_base = OTHER; note = bicyclic nucleic acid (BNA)
  modified_base 14: mod_base = OTHER; note = bicyclic nucleic acid (BNA)
  modified_base 21..22: mod_base = OTHER; note = bicyclic nucleic acid (BNA)
  modified_base 2: mod_base = OTHER; note = 5-methyl
  modified_base 14: mod_base = OTHER; note = 5-methyl
  modified_base 19: mod_base = OTHER; note = 5-methyl
  source 1..22: mol_type = other DNA
tcaaggaagatggcatttctag

SEQ ID NO: 15875 - DNA, 20 bp, synthetic construct
  misc_feature 1..20: note = Description of Artificial Sequence: Synthetic Antisense oligonucleotide
  modified_base 1..2: mod_base = OTHER; note = bicyclic nucleic acid (BNA)
  modified_base 9: mod_base = OTHER; note = bicyclic nucleic acid (BNA)
  modified_base 14: mod_base = OTHER; note = bicyclic nucleic acid (BNA)
  modified_base 19..20: mod_base = OTHER; note = bicyclic nucleic acid (BNA)
  modified_base 2: mod_base = OTHER; note = 5-methyl
  modified_base 14: mod_base = OTHER; note = 5-methyl
  modified_base 19: mod_base = OTHER; note = 5-methyl
  source 1..20: mol_type = other DNA
tcaaggaagatggcatttct

SEQ ID NO: 15876 - DNA, 20 bp, synthetic construct
  misc_feature 1..20: note = Description of Artificial Sequence: Synthetic Antisense oligonucleotide
  modified_base 1..2: mod_base = OTHER; note = bicyclic nucleic acid (BNA)
  modified_base 5: mod_base = OTHER; note = bicyclic nucleic acid (BNA)
  modified_base 9: mod_base = OTHER; note = bicyclic nucleic acid (BNA)
  modified_base 19..20: mod_base = OTHER; note = bicyclic nucleic acid (BNA)
  modified_base 2: mod_base = OTHER; note = 5-methyl
  modified_base 14: mod_base = OTHER; note = 5-methyl
  modified_base 19: mod_base = OTHER; note = 5-methyl
  source 1..20: mol_type = other DNA
tcaaggaagatggcatttct

SEQ ID NO: 15877 - DNA, 20 bp, synthetic construct
  misc_feature 1..20: note = Description of Artificial Sequence: Synthetic Antisense oligonucleotide
  modified_base 1..2: mod_base = OTHER; note = bicyclic nucleic acid (BNA)
  modified_base 6: mod_base = OTHER; note = bicyclic nucleic acid (BNA)
  modified_base 14: mod_base = OTHER; note = bicyclic nucleic acid (BNA)
  modified_base 19..20: mod_base = OTHER; note = bicyclic nucleic acid (BNA)
  modified_base 2: mod_base = OTHER; note = 5-methyl
  modified_base 14: mod_base = OTHER; note = 5-methyl
  modified_base 19: mod_base = OTHER; note = 5-methyl
  source 1..20: mol_type = other DNA
tcaaggaagatggcatttct

SEQ ID NO: 15878 - DNA, 20 bp, synthetic construct
  misc_feature 1..20: note = Description of Artificial Sequence: Synthetic Antisense oligonucleotide
  modified_base 1..2: mod_base = OTHER; note = bicyclic nucleic acid (BNA)
  modified_base 5: mod_base = OTHER; note = bicyclic nucleic acid (BNA)
  modified_base 13: mod_base = OTHER; note = bicyclic nucleic acid (BNA)
  modified_base 19..20: mod_base = OTHER; note = bicyclic nucleic acid (BNA)
  modified_base 2: mod_base = OTHER; note = 5-methyl
  modified_base 14: mod_base = OTHER; note = 5-methyl
  modified_base 19: mod_base = OTHER; note = 5-methyl
  source 1..20: mol_type = other DNA
tcaaggaagatggcatttct

SEQ ID NO: 15879 - DNA, 20 bp, synthetic construct
  misc_feature 1..20: note = Description of Artificial Sequence: Synthetic Antisense oligonucleotide
  modified_base 1..2: mod_base = OTHER; note = bicyclic nucleic acid (BNA)
  modified_base 6: mod_base = OTHER; note = bicyclic nucleic acid (BNA)
  modified_base 9: mod_base = OTHER; note = bicyclic nucleic acid (BNA)
  modified_base 19..20: mod_base = OTHER; note = bicyclic nucleic acid (BNA)
  modified_base 2: mod_base = OTHER; note = 5-methyl
  modified_base 14: mod_base = OTHER; note = 5-methyl
  modified_base 19: mod_base = OTHER; note = 5-methyl
  source 1..20: mol_type = other DNA
tcaaggaagatggcatttct

SEQ ID NO: 15880 - DNA, 20 bp, synthetic construct
  misc_feature 1..20: note = Description of Artificial Sequence: Synthetic Antisense oligonucleotide
  modified_base 1..2: mod_base = OTHER; note = bicyclic nucleic acid (BNA)
  modified_base 13..14: mod_base = OTHER; note = bicyclic nucleic acid (BNA)
  modified_base 19..20: mod_base = OTHER; note = bicyclic nucleic acid (BNA)
  modified_base 2: mod_base = OTHER; note = 5-methyl
  modified_base 14: mod_base = OTHER; note = 5-methyl
  modified_base 19: mod_base = OTHER; note = 5-methyl
  source 1..20: mol_type = other DNA
tcaaggaagatggcatttct

SEQ ID NO: 15881 - DNA, 20 bp, synthetic construct
  misc_feature 1..20: note = Description of Artificial Sequence: Synthetic Antisense oligonucleotide
  modified_base 1..2: mod_base = OTHER; note = bicyclic nucleic acid (BNA)
  modified_base 6: mod_base = OTHER; note = bicyclic nucleic acid (BNA)
  modified_base 13: mod_base = OTHER; note = bicyclic nucleic acid (BNA)
  modified_base 19..20: mod_base = OTHER; note = bicyclic nucleic acid (BNA)
  modified_base 2: mod_base = OTHER; note = 5-methyl
  modified_base 14: mod_base = OTHER; note = 5-methyl
  modified_base 19: mod_base = OTHER; note = 5-methyl
  source 1..20: mol_type = other DNA
tcaaggaagatggcatttct

SEQ ID NO: 15882 - DNA, 20 bp, synthetic construct
  misc_feature 1..20: note = Description of Artificial Sequence: Synthetic Antisense oligonucleotide
  modified_base 1..2: mod_base = OTHER; note = bicyclic nucleic acid (BNA)
  modified_base 5: mod_base = OTHER; note = bicyclic nucleic acid (BNA)
  modified_base 14: mod_base = OTHER; note = bicyclic nucleic acid (BNA)
  modified_base 19..20: mod_base = OTHER; note = bicyclic nucleic acid (BNA)
  modified_base 2: mod_base = OTHER; note = 5-methyl
  modified_base 14: mod_base = OTHER; note = 5-methyl
  modified_base 19: mod_base = OTHER; note = 5-methyl
  source 1..20: mol_type = other DNA
tcaaggaagatggcatttct

SEQ ID NO: 15883 - DNA, 20 bp, synthetic construct
  misc_feature 1..20: note = Description of Artificial Sequence: Synthetic Antisense oligonucleotide
  modified_base 1..2: mod_base = OTHER; note = bicyclic nucleic acid (BNA)
  modified_base 12: mod_base = OTHER; note = bicyclic nucleic acid (BNA)
  modified_base 14: mod_base = OTHER; note = bicyclic nucleic acid (BNA)
  modified_base 19..20: mod_base = OTHER; note = bicyclic nucleic acid (BNA)
  modified_base 2: mod_base = OTHER; note = 5-methyl
  modified_base 14: mod_base = OTHER; note = 5-methyl
  modified_base 19: mod_base = OTHER; note = 5-methyl
  source 1..20: mol_type = other DNA
tcaaggaagatggcatttct

SEQ ID NO: 15884 - DNA, 20 bp, synthetic construct
  misc_feature 1..20: note = Description of Artificial Sequence: Synthetic Antisense oligonucleotide
  modified_base 1..2: mod_base = OTHER; note = bicyclic nucleic acid (BNA)
  modified_base 6: mod_base = OTHER; note = bicyclic nucleic acid (BNA)
  modified_base 12: mod_base = OTHER; note = bicyclic nucleic acid (BNA)
  modified_base 19..20: mod_base = OTHER; note = bicyclic nucleic acid (BNA)
  modified_base 2: mod_base = OTHER; note = 5-methyl
  modified_base 14: mod_base = OTHER; note = 5-methyl
  modified_base 19: mod_base = OTHER; note = 5-methyl
  source 1..20: mol_type = other DNA
tcaaggaagatggcatttct

SEQ ID NO: 15885 - DNA, 20 bp, synthetic construct
  misc_feature 1..20: note = Description of Artificial Sequence: Synthetic Antisense oligonucleotide
  modified_base 1..2: mod_base = OTHER; note = bicyclic nucleic acid (BNA)
  modified_base 5..6: mod_base = OTHER; note = bicyclic nucleic acid (BNA)
  modified_base 19..20: mod_base = OTHER; note = bicyclic nucleic acid (BNA)
  modified_base 2: mod_base = OTHER; note = 5-methyl
  modified_base 14: mod_base = OTHER; note = 5-methyl
  modified_base 19: mod_base = OTHER; note = 5-methyl
  source 1..20: mol_type = other DNA
tcaaggaagatggcatttct

SEQ ID NO: 15886 - DNA, 20 bp, synthetic construct
  misc_feature 1..20: note = Description of Artificial Sequence: Synthetic Antisense oligonucleotide
  modified_base 1..2: mod_base = OTHER; note = bicyclic nucleic acid (BNA)
  modified_base 9: mod_base = OTHER; note = bicyclic nucleic acid (BNA)
  modified_base 12: mod_base = OTHER; note = bicyclic nucleic acid (BNA)
  modified_base 19..20: mod_base = OTHER; note = bicyclic nucleic acid (BNA)
  modified_base 2: mod_base = OTHER; note = 5-methyl
  modified_base 14: mod_base = OTHER; note = 5-methyl
  modified_base 19: mod_base = OTHER; note = 5-methyl
  source 1..20: mol_type = other DNA
tcaaggaagatggcatttct

SEQ ID NO: 15887 - DNA, 20 bp, synthetic construct
  misc_feature 1..20: note = Description of Artificial Sequence: Synthetic Antisense oligonucleotide
  modified_base 1..2: mod_base = OTHER; note = bicyclic nucleic acid (BNA)
  modified_base 12..13: mod_base = OTHER; note = bicyclic nucleic acid (BNA)
  modified_base 19..20: mod_base = OTHER; note = bicyclic nucleic acid (BNA)
  modified_base 2: mod_base = OTHER; note = 5-methyl
  modified_base 14: mod_base = OTHER; note = 5-methyl
  modified_base 19: mod_base = OTHER; note = 5-methyl
  source 1..20: mol_type = other DNA
tcaaggaagatggcatttct

SEQ ID NO: 15888 - DNA, 20 bp, synthetic construct
  misc_feature 1..20: note = Description of Artificial Sequence: Synthetic Antisense oligonucleotide
  modified_base 1..2: mod_base = OTHER; note = bicyclic nucleic acid (BNA)
  modified_base 5: mod_base = OTHER; note = bicyclic nucleic acid (BNA)
  modified_base 12: mod_base = OTHER; note = bicyclic nucleic acid (BNA)
  modified_base 19..20: mod_base = OTHER; note = bicyclic nucleic acid (BNA)
  modified_base 2: mod_base = OTHER; note = 5-methyl
  modified_base 14: mod_base = OTHER; note = 5-methyl
  modified_base 19: mod_base = OTHER; note = 5-methyl
  source 1..20: mol_type = other DNA
tcaaggaagatggcatttct

SEQ ID NO: 15889 - DNA, 20 bp, synthetic construct
  misc_feature 1..20: note = Description of Artificial Sequence: Synthetic Antisense oligonucleotide
  modified_base 1..2: mod_base = OTHER; note = bicyclic nucleic acid (BNA)
  modified_base 9: mod_base = OTHER; note = bicyclic nucleic acid (BNA)
  modified_base 13: mod_base = OTHER; note = bicyclic nucleic acid (BNA)
  modified_base 19..20: mod_base = OTHER; note = bicyclic nucleic acid (BNA)
  modified_base 2: mod_base = OTHER; note = 5-methyl
  modified_base 14: mod_base = OTHER; note = 5-methyl
  modified_base 19: mod_base = OTHER; note = 5-methyl
  source 1..20: mol_type = other DNA
tcaaggaagatggcatttct

SEQ ID NO: 15890 - DNA, 22 bp, synthetic construct
  misc_feature 1..22: note = Description of Artificial Sequence: Synthetic Antisense oligonucleotide
  modified_base 1..2: mod_base = OTHER; note = bicyclic nucleic acid (BNA)
  modified_base 9: mod_base = OTHER; note = bicyclic nucleic acid (BNA)
  modified_base 14: mod_base = OTHER; note = bicyclic nucleic acid (BNA)
  modified_base 21..22: mod_base = OTHER; note = bicyclic nucleic acid (BNA)
  modified_base 2: mod_base = OTHER; note = 5-methyl
  modified_base 14: mod_base = OTHER; note = 5-methyl
  modified_base 19: mod_base = OTHER; note = 5-methyl
  source 1..22: mol_type = other DNA
tcaaggaagatggcatttctag

SEQ ID NO: 15891 - DNA, 22 bp, synthetic construct
  misc_feature 1..22: note = Description of Artificial Sequence: Synthetic Antisense oligonucleotide
  modified_base 1..2: mod_base = OTHER; note = bicyclic nucleic acid (BNA)
  modified_base 5: mod_base = OTHER; note = bicyclic nucleic acid (BNA)
  modified_base 9: mod_base = OTHER; note = bicyclic nucleic acid (BNA)
  modified_base 21..22: mod_base = OTHER; note = bicyclic nucleic acid (BNA)
  modified_base 2: mod_base = OTHER; note = 5-methyl
  modified_base 14: mod_base = OTHER; note = 5-methyl
  modified_base 19: mod_base = OTHER; note = 5-methyl
  source 1..22: mol_type = other DNA
tcaaggaagatggcatttctag

SEQ ID NO: 15892 - DNA, 22 bp, synthetic construct
  misc_feature 1..22: note = Description of Artificial Sequence: Synthetic Antisense oligonucleotide
  modified_base 1..2: mod_base = OTHER; note = bicyclic nucleic acid (BNA)
  modified_base 5: mod_base = OTHER; note = bicyclic nucleic acid (BNA)
  modified_base 19: mod_base = OTHER; note = bicyclic nucleic acid (BNA)
  modified_base 21..22: mod_base = OTHER; note = bicyclic nucleic acid (BNA)
  modified_base 2: mod_base = OTHER; note = 5-methyl
  modified_base 14: mod_base = OTHER; note = 5-methyl
  modified_base 19: mod_base = OTHER; note = 5-methyl
  source 1..22: mol_type = other DNA
tcaaggaagatggcatttctag

SEQ ID NO: 15893 - DNA, 22 bp, synthetic construct
  misc_feature 1..22: note = Description of Artificial Sequence: Synthetic Antisense oligonucleotide
  modified_base 1..2: mod_base = OTHER; note = bicyclic nucleic acid (BNA)
  modified_base 6: mod_base = OTHER; note = bicyclic nucleic acid (BNA)
  modified_base 14: mod_base = OTHER; note = bicyclic nucleic acid (BNA)
  modified_base 21..22: mod_base = OTHER; note = bicyclic nucleic acid (BNA)
  modified_base 2: mod_base = OTHER; note = 5-methyl
  modified_base 14: mod_base = OTHER; note = 5-methyl
  modified_base 19: mod_base = OTHER; note = 5-methyl
  source 1..22: mol_type = other DNA
tcaaggaagatggcatttctag

SEQ ID NO: 15894 - DNA, 22 bp, synthetic construct
  misc_feature 1..22: note = Description of Artificial Sequence: Synthetic Antisense oligonucleotide
  modified_base 1..2: mod_base = OTHER; note = bicyclic nucleic acid (BNA)
  modified_base 5: mod_base = OTHER; note = bicyclic nucleic acid (BNA)
  modified_base 13: mod_base = OTHER; note = bicyclic nucleic acid (BNA)
  modified_base 21..22: mod_base = OTHER; note = bicyclic nucleic acid (BNA)
  modified_base 2: mod_base = OTHER; note = 5-methyl
  modified_base 14: mod_base = OTHER; note = 5-methyl
  modified_base 19: mod_base = OTHER; note = 5-methyl
  source 1..22: mol_type = other DNA
tcaaggaagatggcatttctag

SEQ ID NO: 15895 - DNA, 22 bp, synthetic construct
  misc_feature 1..22: note = Description of Artificial Sequence: Synthetic Antisense oligonucleotide
  modified_base 1..2: mod_base = OTHER; note = bicyclic nucleic acid (BNA)
  modified_base 6: mod_base = OTHER; note = bicyclic nucleic acid (BNA)
  modified_base 9: mod_base = OTHER; note = bicyclic nucleic acid (BNA)
  modified_base 21..22: mod_base = OTHER; note = bicyclic nucleic acid (BNA)
  modified_base 2: mod_base = OTHER; note = 5-methyl
  modified_base 14: mod_base = OTHER; note = 5-methyl
  modified_base 19: mod_base = OTHER; note = 5-methyl
  source 1..22: mol_type = other DNA
tcaaggaagatggcatttctag

SEQ ID NO: 15896 - DNA, 22 bp, synthetic construct
  misc_feature 1..22: note = Description of Artificial Sequence: Synthetic Antisense oligonucleotide
  modified_base 1..2: mod_base = OTHER; note = bicyclic nucleic acid (BNA)
  modified_base 13..14: mod_base = OTHER; note = bicyclic nucleic acid (BNA)
  modified_base 21..22: mod_base = OTHER; note = bicyclic nucleic acid (BNA)
  modified_base 2: mod_base = OTHER; note = 5-methyl
  modified_base 14: mod_base = OTHER; note = 5-methyl
  modified_base 19: mod_base = OTHER; note = 5-methyl
  source 1..22: mol_type = other DNA
tcaaggaagatggcatttctag

SEQ ID NO: 15897 - DNA, 22 bp, synthetic construct
  misc_feature 1..22: note = Description of Artificial Sequence: Synthetic Antisense oligonucleotide
  modified_base 1..2: mod_base = OTHER; note = bicyclic nucleic acid (BNA)
  modified_base 6: mod_base = OTHER; note = bicyclic nucleic acid (BNA)
  modified_base 13: mod_base = OTHER; note = bicyclic nucleic acid (BNA)
  modified_base 21..22: mod_base = OTHER; note = bicyclic nucleic acid (BNA)
  modified_base 2: mod_base = OTHER; note = 5-methyl
  modified_base 14: mod_base = OTHER; note = 5-methyl
  modified_base 19: mod_base = OTHER; note = 5-methyl
  source 1..22: mol_type = other DNA
tcaaggaagatggcatttctag

SEQ ID NO: 15898 - DNA, 22 bp, synthetic construct
  misc_feature 1..22: note = Description of Artificial Sequence: Synthetic Antisense oligonucleotide
  modified_base 1..2: mod_base = OTHER; note = bicyclic nucleic acid (BNA)
  modified_base 6: mod_base = OTHER; note = bicyclic nucleic acid (BNA)
  modified_base 19: mod_base = OTHER; note = bicyclic nucleic acid (BNA)
  modified_base 21..22: mod_base = OTHER; note = bicyclic nucleic acid (BNA)
  modified_base 2: mod_base = OTHER; note = 5-methyl
  modified_base 14: mod_base = OTHER; note = 5-methyl
  modified_base 19: mod_base = OTHER; note = 5-methyl
  source 1..22: mol_type = other DNA
tcaaggaagatggcatttctag

SEQ ID NO: 15899 - DNA, 22 bp, synthetic construct
  misc_feature 1..22: note = Description of Artificial Sequence: Synthetic Antisense oligonucleotide
  modified_base 1..2: mod_base = OTHER; note = bicyclic nucleic acid (BNA)
  modified_base 5: mod_base = OTHER; note = bicyclic nucleic acid (BNA)
  modified_base 14: mod_base = OTHER; note = bicyclic nucleic acid (BNA)
  modified_base 21..22: mod_base = OTHER; note = bicyclic nucleic acid (BNA)
  modified_base 2: mod_base = OTHER; note = 5-methyl
  modified_base 14: mod_base = OTHER; note = 5-methyl
  modified_base 19: mod_base = OTHER; note = 5-methyl
  source 1..22: mol_type = other DNA
tcaaggaagatggcatttctag

SEQ ID NO: 15900 - DNA, 22 bp, synthetic construct
  misc_feature 1..22: note = Description of Artificial Sequence: Synthetic Antisense oligonucleotide
  modified_base 1..2: mod_base = OTHER; note = bicyclic nucleic acid (BNA)
  modified_base 12: mod_base = OTHER; note = bicyclic nucleic acid (BNA)
  modified_base 19: mod_base = OTHER; note = bicyclic nucleic acid (BNA)
  modified_base 21..22: mod_base = OTHER; note = bicyclic nucleic acid (BNA)
  modified_base 2: mod_base = OTHER; note = 5-methyl
  modified_base 14: mod_base = OTHER; note = 5-methyl
  modified_base 19: mod_base = OTHER; note = 5-methyl
  source 1..22: mol_type = other DNA
tcaaggaagatggcatttctag

SEQ ID NO: 15901 - DNA, 22 bp, synthetic construct
  misc_feature 1..22: note = Description of Artificial Sequence: Synthetic Antisense oligonucleotide
  modified_base 1..2: mod_base = OTHER; note = bicyclic nucleic acid (BNA)
  modified_base 12: mod_base = OTHER; note = bicyclic nucleic acid (BNA)
  modified_base 14: mod_base = OTHER; note = bicyclic nucleic acid (BNA)
  modified_base 21..22: mod_base = OTHER; note = bicyclic nucleic acid (BNA)
  modified_base 2: mod_base = OTHER; note = 5-methyl
  modified_base 14: mod_base = OTHER; note = 5-methyl
  modified_base 19: mod_base = OTHER; note = 5-methyl
  source 1..22: mol_type = other DNA
tcaaggaagatggcatttctag

SEQ ID NO: 15902 - DNA, 22 bp, synthetic construct
  misc_feature 1..22: note = Description of Artificial Sequence: Synthetic Antisense oligonucleotide
  modified_base 1..2: mod_base = OTHER; note = bicyclic nucleic acid (BNA)
  modified_base 6: mod_base = OTHER; note = bicyclic nucleic acid (BNA)
  modified_base 12: mod_base = OTHER; note = bicyclic nucleic acid (BNA)
  modified_base 21..22: mod_base = OTHER; note = bicyclic nucleic acid (BNA)
  modified_base 2: mod_base = OTHER; note = 5-methyl
  modified_base 14: mod_base = OTHER; note = 5-methyl
  modified_base 19: mod_base = OTHER; note = 5-methyl
  source 1..22: mol_type = other DNA
tcaaggaagatggcatttctag

SEQ ID NO: 15903 - DNA, 22 bp, synthetic construct
  misc_feature 1..22: note = Description of Artificial Sequence: Synthetic Antisense oligonucleotide
  modified_base 1..2: mod_base = OTHER; note = bicyclic nucleic acid (BNA)
  modified_base 5..6: mod_base = OTHER; note = bicyclic nucleic acid (BNA)
  modified_base 21..22: mod_base = OTHER; note = bicyclic nucleic acid (BNA)
  modified_base 2: mod_base = OTHER; note = 5-methyl
  modified_base 14: mod_base = OTHER; note = 5-methyl
  modified_base 19: mod_base = OTHER; note = 5-methyl
  source 1..22: mol_type = other DNA
tcaaggaagatggcatttctag

SEQ ID NO: 15904 - DNA, 22 bp, synthetic construct
  misc_feature 1..22: note = Description of Artificial Sequence: Synthetic Antisense oligonucleotide
  modified_base 1..2: mod_base = OTHER; note = bicyclic nucleic acid (BNA)
  modified_base 9: mod_base = OTHER; note = bicyclic nucleic acid (BNA)
  modified_base 12: mod_base = OTHER; note = bicyclic nucleic acid (BNA)
  modified_base 21..22: mod_base = OTHER; note = bicyclic nucleic acid (BNA)
  modified_base 2: mod_base = OTHER; note = 5-methyl
  modified_base 14: mod_base = OTHER; note = 5-methyl
  modified_base 19: mod_base = OTHER; note = 5-methyl
  source 1..22: mol_type = other DNA
tcaaggaagatggcatttctag

SEQ ID NO: 15905 - DNA, 22 bp, synthetic construct
  misc_feature 1..22: note = Description of Artificial Sequence: Synthetic Antisense oligonucleotide
  modified_base 1..2: mod_base = OTHER; note = bicyclic nucleic acid (BNA)
  modified_base 13: mod_base = OTHER; note = bicyclic nucleic acid (BNA)
  modified_base 19: mod_base = OTHER; note = bicyclic nucleic acid (BNA)
  modified_base 21..22: mod_base = OTHER; note = bicyclic nucleic acid (BNA)
  modified_base 2: mod_base = OTHER; note = 5-methyl
  modified_base 14: mod_base = OTHER; note = 5-methyl
  modified_base 19: mod_base = OTHER; note = 5-methyl
  source 1..22: mol_type = other DNA
tcaaggaagatggcatttctag

SEQ ID NO: 15906 - DNA, 22 bp, synthetic construct
  misc_feature 1..22: note = Description of Artificial Sequence: Synthetic Antisense oligonucleotide
  modified_base 1..2: mod_base = OTHER; note = bicyclic nucleic acid (BNA)
  modified_base 12..13: mod_base = OTHER; note = bicyclic nucleic acid (BNA)
  modified_base 21..22: mod_base = OTHER; note = bicyclic nucleic acid (BNA)
  modified_base 2: mod_base = OTHER; note = 5-methyl
  modified_base 14: mod_base = OTHER; note = 5-methyl
  modified_base 19: mod_base = OTHER; note = 5-methyl
  source 1..22: mol_type = other DNA
tcaaggaagatggcatttctag

SEQ ID NO: 15907 - DNA, 22 bp, synthetic construct
  misc_feature 1..22: note = Description of Artificial Sequence: Synthetic Antisense oligonucleotide
  modified_base 1..2: mod_base = OTHER; note = bicyclic nucleic acid (BNA)
  modified_base 5: mod_base = OTHER; note = bicyclic nucleic acid (BNA)
  modified_base 12: mod_base = OTHER; note = bicyclic nucleic acid (BNA)
  modified_base 21..22: mod_base = OTHER; note = bicyclic nucleic acid (BNA)
  modified_base 2: mod_base = OTHER; note = 5-methyl
  modified_base 14: mod_base = OTHER; note = 5-methyl
  modified_base 19: mod_base = OTHER; note = 5-methyl
  source 1..22: mol_type = other DNA
tcaaggaagatggcatttctag

SEQ ID NO: 15908 - DNA, 22 bp, synthetic construct
  misc_feature 1..22: note = Description of Artificial Sequence: Synthetic Antisense oligonucleotide
  modified_base 1..2: mod_base = OTHER; note = bicyclic nucleic acid (BNA)
  modified_base 9: mod_base = OTHER; note = bicyclic nucleic acid (BNA)
  modified_base 13: mod_base = OTHER; note = bicyclic nucleic acid (BNA)
  modified_base 21..22: mod_base = OTHER; note = bicyclic nucleic acid (BNA)
  modified_base 2: mod_base = OTHER; note = 5-methyl
  modified_base 14: mod_base = OTHER; note = 5-methyl
  modified_base 19: mod_base = OTHER; note = 5-methyl
  source 1..22: mol_type = other DNA
tcaaggaagatggcatttctag

SEQ ID NO: 15909 - DNA, 22 bp, synthetic construct
  misc_feature 1..22: note = Description of Artificial Sequence: Synthetic Antisense oligonucleotide
  modified_base 1..2: mod_base = OTHER; note = bicyclic nucleic acid (BNA)
  modified_base 14: mod_base = OTHER; note = bicyclic nucleic acid (BNA)
  modified_base 19: mod_base = OTHER; note = bicyclic nucleic acid (BNA)
  modified_base 21..22: mod_base = OTHER; note = bicyclic nucleic acid (BNA)
  modified_base 2: mod_base = OTHER; note = 5-methyl
  modified_base 14: mod_base = OTHER; note = 5-methyl
  modified_base 19: mod_base = OTHER; note = 5-methyl
  source 1..22: mol_type = other DNA
tcaaggaagatggcatttctag

SEQ ID NO: 15910 - DNA, 22 bp, synthetic construct
  misc_feature 1..22: note = Description of Artificial Sequence: Synthetic Antisense oligonucleotide
  modified_base 1..2: mod_base = OTHER; note = bicyclic nucleic acid (BNA)
  modified_base 9: mod_base = OTHER; note = bicyclic nucleic acid (BNA)
  modified_base 19: mod_base = OTHER; note = bicyclic nucleic acid (BNA)
  modified_base 21..22: mod_base = OTHER; note = bicyclic nucleic acid (BNA)
  modified_base 2: mod_base = OTHER; note = 5-methyl
  modified_base 14: mod_base = OTHER; note = 5-methyl
  modified_base 19: mod_base = OTHER; note = 5-methyl
  source 1..22: mol_type = other DNA
tcaaggaagatggcatttctag

SEQ ID NO: 15911 - RNA, 18 nt, synthetic construct
  misc_feature 1..18: note = Description of Artificial Sequence: Synthetic Antisense oligonucleotide
  modified_base 1: mod_base = OTHER; note = bicyclic nucleic acid (BNA)
  modified_base 18: mod_base = OTHER; note = bicyclic nucleic acid (BNA)
  source 1..18: mol_type = other RNA
ggtaagttctgtccaagc

SEQ ID NO: 15912 - DNA, 18 bp, synthetic construct
  misc_feature 1..18: note = Description of Artificial Sequence: Synthetic Antisense oligonucleotide
  misc_feature 1..18: note = Original Sequence: gguaaguuctguccaagc
  modified_base 1..2: mod_base = OTHER; note = bicyclic nucleic acid (BNA)
  modified_base 10: mod_base = OTHER; note = bicyclic nucleic acid (BNA)
  modified_base 18: mod_base = OTHER; note = bicyclic nucleic acid (BNA)
  source 1..18: mol_type = other DNA
  modified_base 3: mod_base = OTHER; note = Uracil
  modified_base 7: mod_base = OTHER; note = Uracil
  modified_base 8: mod_base = OTHER; note = Uracil
  modified_base 12: mod_base = OTHER; note = Uracil
ggtaagttctgtccaagc

SEQ ID NO: 15913 - RNA, 18 nt, synthetic construct
  misc_feature 1..18: note = Description of Artificial Sequence: Synthetic Antisense oligonucleotide
  modified_base 1..2: mod_base = OTHER; note = bicyclic nucleic acid (BNA)
  modified_base 17..18: mod_base = OTHER; note = bicyclic nucleic acid (BNA)
  source 1..18: mol_type = other RNA
ggtaagttctgtccaagc

SEQ ID NO: 15914 - RNA, 18 nt, synthetic construct
  misc_feature 1..18: note = Description of Artificial Sequence: Synthetic Antisense oligonucleotide
  modified_base 1..2: mod_base = OTHER; note = bicyclic nucleic acid (BNA)
  modified_base 6: mod_base = OTHER; note = bicyclic nucleic acid (BNA)
  modified_base 18: mod_base = OTHER; note = bicyclic nucleic acid (BNA)
  source 1..18: mol_type = other RNA
ggtaagttctgtccaagc

SEQ ID NO: 15915 - RNA, 18 nt, synthetic construct
  misc_feature 1..18: note = Description of Artificial Sequence: Synthetic Antisense oligonucleotide
  modified_base 1..2: mod_base = OTHER; note = bicyclic nucleic acid (BNA)
  modified_base 11: mod_base = OTHER; note = bicyclic nucleic acid (BNA)
  modified_base 18: mod_base = OTHER; note = bicyclic nucleic acid (BNA)
  source 1..18: mol_type = other RNA
ggtaagttctgtccaagc

SEQ ID NO: 15916 - RNA, 18 nt, synthetic construct
  misc_feature 1..18: note = Description of Artificial Sequence: Synthetic Antisense oligonucleotide
  modified_base 1..2: mod_base = OTHER; note = bicyclic nucleic acid (BNA)
  modified_base 6: mod_base = OTHER; note = bicyclic nucleic acid (BNA)
  modified_base 11: mod_base = OTHER; note = bicyclic nucleic acid (BNA)
  modified_base 18: mod_base = OTHER; note = bicyclic nucleic acid (BNA)
  source 1..18: mol_type = other RNA
ggtaagttctgtccaagc

SEQ ID NO: 15917 - RNA, 18 nt, synthetic construct
  misc_feature 1..18: note = Description of Artificial Sequence: Synthetic Antisense oligonucleotide
  modified_base 1..2: mod_base = OTHER; note = bicyclic nucleic acid (BNA)
  modified_base 6: mod_base = OTHER; note = bicyclic nucleic acid (BNA)
  modified_base 11: mod_base = OTHER; note = bicyclic nucleic acid (BNA)
  modified_base 17..18: mod_base = OTHER; note = bicyclic nucleic acid (BNA)
  source 1..18: mol_type = other RNA
ggtaagttctgtccaagc

SEQ ID NO: 15918 - RNA, 18 nt, synthetic construct
  misc_feature 1..18: note = Description of Artificial Sequence: Synthetic Antisense oligonucleotide
  modified_base 1..2: mod_base = OTHER; note = bicyclic nucleic acid (BNA)
  modified_base 18: mod_base = OTHER; note = bicyclic nucleic acid (BNA)
  source 1..18: mol_type = other RNA
ggtaagttctgtccaagc

SEQ ID NO: 15919 - RNA, 18 nt, synthetic construct
  misc_feature 1..18: note = Description of Artificial Sequence: Synthetic Antisense oligonucleotide
  modified_base 1: mod_base = OTHER; note = bicyclic nucleic acid (BNA)
  modified_base 6: mod_base = OTHER; note = bicyclic nucleic acid (BNA)
  modified_base 18: mod_base = OTHER; note = bicyclic nucleic acid (BNA)
  source 1..18: mol_type = other RNA
ggtaagttctgtccaagc

SEQ ID NO: 15920 - RNA, 18 nt, synthetic construct
  misc_feature 1..18: note = Description of Artificial Sequence: Synthetic Antisense oligonucleotide
  modified_base 1: mod_base = OTHER; note = bicyclic nucleic acid (BNA)
  modified_base 11: mod_base = OTHER; note = bicyclic nucleic acid (BNA)
  modified_base 18: mod_base = OTHER; note = bicyclic nucleic acid (BNA)
  source 1..18: mol_type = other RNA
ggtaagttctgtccaagc

SEQ ID NO: 15921 - RNA, 18 nt, synthetic construct
  misc_feature 1..18: note = Description of Artificial Sequence: Synthetic Antisense oligonucleotide
  modified_base 1: mod_base = OTHER; note = bicyclic nucleic acid (BNA)
  modified_base 9: mod_base = OTHER; note = bicyclic nucleic acid (BNA)
  modified_base 18: mod_base = OTHER; note = bicyclic nucleic acid (BNA)
  source 1..18: mol_type = other RNA
ggtaagttctgtccaagc

SEQ ID NO: 15922 - RNA, 18 nt, synthetic construct
  misc_feature 1..18: note = Description of Artificial Sequence: Synthetic Antisense oligonucleotide
  modified_base 1: mod_base = OTHER; note = bicyclic nucleic acid (BNA)
  modified_base 18: mod_base = OTHER; note = bicyclic nucleic acid (BNA)
  source 1..18: mol_type = other RNA
ggtaagttctgtccaagc

SEQ ID NO: 15923 - RNA, 18 nt, synthetic construct
  misc_feature 1..18: note = Description of Artificial Sequence: Synthetic Antisense oligonucleotide
  modified_base 1: mod_base = OTHER; note = bicyclic nucleic acid (BNA)
  modified_base 5: mod_base = OTHER; note = bicyclic nucleic acid (BNA)
  modified_base 18: mod_base = OTHER; note = bicyclic nucleic acid (BNA)
  source 1..18: mol_type = other RNA
gtaagttctgtccaagcc

SEQ ID NO: 15924 - RNA, 18 nt, synthetic construct
  misc_feature 1..18: note = Description of Artificial Sequence: Synthetic Antisense oligonucleotide
  modified_base 1: mod_base = OTHER; note = bicyclic nucleic acid (BNA)
  modified_base 18: mod_base = OTHER; note = bicyclic nucleic acid (BNA)
  source 1..18: mol_type = other RNA
gtaagttctgtccaagcc

SEQ ID NO: 15925 - RNA, 18 nt, synthetic construct
  misc_feature 1..18: note = Description of Artificial Sequence: Synthetic Antisense oligonucleotide
  modified_base 1: mod_base = OTHER; note = bicyclic nucleic acid (BNA)
  modified_base 18: mod_base = OTHER; note = bicyclic nucleic acid (BNA)
  source 1..18: mol_type = other RNA
agtcggtaagttctgtcc

SEQ ID NO: 15926 - RNA, 18 nt, synthetic construct
  misc_feature 1..18: note = Description of Artificial Sequence: Synthetic Antisense oligonucleotide
  modified_base 1: mod_base = OTHER; note = bicyclic nucleic acid (BNA)
  modified_base 5..6: mod_base = OTHER; note = bicyclic nucleic acid (BNA)
  modified_base 10: mod_base = OTHER; note = bicyclic nucleic acid (BNA)
  modified_base 18: mod_base = OTHER; note = bicyclic nucleic acid (BNA)
  source 1..18: mol_type = other RNA
agtcggtaagttctgtcc

SEQ ID NO: 15927 - RNA, 18 nt, synthetic construct
  misc_feature 1..18: note = Description of Artificial Sequence: Synthetic Antisense oligonucleotide
  modified_base 1: mod_base = OTHER; note = bicyclic nucleic acid (BNA)
  modified_base 6: mod_base = OTHER; note = bicyclic nucleic acid (BNA)
  modified_base 10: mod_base = OTHER; note = bicyclic nucleic acid (BNA)
  modified_base 13: mod_base = OTHER; note = bicyclic nucleic acid (BNA)
  modified_base 18: mod_base = OTHER; note = bicyclic nucleic acid (BNA)
  source 1..18: mol_type = other RNA
agtcggtaagttctgtcc

SEQ ID NO: 15928 - RNA, 18 nt, synthetic construct
  misc_feature 1..18: note = Description of Artificial Sequence: Synthetic Antisense oligonucleotide
  modified_base 1: mod_base = OTHER; note = bicyclic nucleic acid (BNA)
  modified_base 5: mod_base = OTHER; note = bicyclic nucleic acid (BNA)
  modified_base 10: mod_base = OTHER; note = bicyclic nucleic acid (BNA)
  modified_base 13: mod_base = OTHER; note = bicyclic nucleic acid (BNA)
  modified_base 18: mod_base = OTHER; note = bicyclic nucleic acid (BNA)
  source 1..18: mol_type = other RNA
agtcggtaagttctgtcc

SEQ ID NO: 15929 - RNA, 18 nt, synthetic construct
  misc_feature 1..18: note = Description of Artificial Sequence: Synthetic Antisense oligonucleotide
  modified_base 1: mod_base = OTHER; note = bicyclic nucleic acid (BNA)
  modified_base 10: mod_base = OTHER; note = bicyclic nucleic acid (BNA)
  modified_base 13: mod_base = OTHER; note = bicyclic nucleic acid (BNA)
  modified_base 18: mod_base = OTHER; note = bicyclic nucleic acid (BNA)
  source 1..18: mol_type = other RNA
agtcggtaagttctgtcc

SEQ ID NO: 15930 - RNA, 18 nt, synthetic construct
  misc_feature 1..18: note = Description of Artificial Sequence: Synthetic Antisense oligonucleotide
  modified_base 1: mod_base = OTHER; note = bicyclic nucleic acid (BNA)
  modified_base 5: mod_base = OTHER; note = bicyclic nucleic acid (BNA)
  modified_base 10: mod_base = OTHER; note = bicyclic nucleic acid (BNA)
  modified_base 18: mod_base = OTHER; note = bicyclic nucleic acid (BNA)
  source 1..18: mol_type = other RNA
agtcggtaagttctgtcc

SEQ ID NO: 15931 - RNA, 18 nt, synthetic construct
  misc_feature 1..18: note = Description of Artificial Sequence: Synthetic Antisense oligonucleotide
  modified_base 1: mod_base = OTHER; note = bicyclic nucleic acid (BNA)
  modified_base 5: mod_base = OTHER; note = bicyclic nucleic acid (BNA)
  modified_base 13: mod_base = OTHER; note = bicyclic nucleic acid (BNA)
  modified_base 18: mod_base = OTHER; note = bicyclic nucleic acid (BNA)
  source 1..18: mol_type = other RNA
agtcggtaagttctgtcc

SEQ ID NO: 15932 - RNA, 18 nt, synthetic construct
  misc_feature 1..18: note = Description of Artificial Sequence: Synthetic Antisense oligonucleotide
  modified_base 1: mod_base = OTHER; note = bicyclic nucleic acid (BNA)
  modified_base 5..6: mod_base = OTHER; note = bicyclic nucleic acid (BNA)
  modified_base 13: mod_base = OTHER; note = bicyclic nucleic acid (BNA)
  modified_base 18: mod_base = OTHER; note = bicyclic nucleic acid (BNA)
  source 1..18: mol_type = other RNA
agtcggtaagttctgtcc

SEQ ID NO: 15933 - RNA, 18 nt, synthetic construct
  misc_feature 1..18: note = Description of Artificial Sequence: Synthetic Antisense oligonucleotide
  modified_base 1: mod_base = OTHER; note = bicyclic nucleic acid (BNA)
  modified_base 5: mod_base = OTHER; note = bicyclic nucleic acid (BNA)
  modified_base 13: mod_base = OTHER; note = bicyclic nucleic acid (BNA)
  modified_base 18: mod_base = OTHER; note = bicyclic nucleic acid (BNA)
  source 1..18: mol_type = other RNA
agtcggtaagttctgtcc

SEQ ID NO: 15934 - RNA, 18 nt, synthetic construct
  misc_feature 1..18: note = Description of Artificial Sequence: Synthetic Antisense oligonucleotide
  modified_base 1: mod_base = OTHER; note = bicyclic nucleic acid (BNA)
  modified_base 6: mod_base = OTHER; note = bicyclic nucleic acid (BNA)
  modified_base 13: mod_base = OTHER; note = bicyclic nucleic acid (BNA)
  modified_base 18: mod_base = OTHER; note = bicyclic nucleic acid (BNA)
  source 1..18: mol_type = other RNA
agtcggtaagttctgtcc

SEQ ID NO: 15935 - RNA, 18 nt, synthetic construct
  misc_feature 1..18: note = Description of Artificial Sequence: Synthetic Antisense oligonucleotide
  modified_base 1: mod_base = OTHER; note = bicyclic nucleic acid (BNA)
  modified_base 18: mod_base = OTHER; note = bicyclic nucleic acid (BNA)
  source 1..18: mol_type = other RNA
ctgtccaagcccggttga

SEQ ID NO: 15936 - RNA, 18 nt, synthetic construct
  misc_feature 1..18: note = Description of Artificial Sequence: Synthetic Antisense oligonucleotide
  modified_base 1: mod_base = OTHER; note = bicyclic nucleic acid (BNA)
  modified_base 9: mod_base = OTHER; note = bicyclic nucleic acid (BNA)
  modified_base 14: mod_base = OTHER; note = bicyclic nucleic acid (BNA)
  modified_base 18: mod_base = OTHER; note = bicyclic nucleic acid (BNA)
  source 1..18: mol_type = other RNA
ctgtccaagcccggttga

SEQ ID NO: 15937 - RNA, 18 nt, synthetic construct
  misc_feature 1..18: note = Description of Artificial Sequence: Synthetic Antisense oligonucleotide
  modified_base 1: mod_base = OTHER; note = bicyclic nucleic acid (BNA)
  modified_base 9: mod_base = OTHER; note = bicyclic nucleic acid (BNA)
  modified_base 18: mod_base = OTHER; note = bicyclic nucleic acid (BNA)
  source 1..18: mol_type = other RNA
ctgtccaagcccggttga

SEQ ID NO: 15938 - RNA, 18 nt, synthetic construct
  misc_feature 1..18: note = Description of Artificial Sequence: Synthetic Antisense oligonucleotide
  modified_base 1: mod_base = OTHER; note = bicyclic nucleic acid (BNA)
  modified_base 14: mod_base = OTHER; note = bicyclic nucleic acid (BNA)
  modified_base 18: mod_base = OTHER; note = bicyclic nucleic acid (BNA)
  source 1..18: mol_type = other RNA
ctgtccaagcccggttga

SEQ ID NO: 15939 - RNA, 18 nt, synthetic construct
  misc_feature 1..18: note = Description of Artificial Sequence: Synthetic Antisense oligonucleotide
  modified_base 1: mod_base = OTHER; note = bicyclic nucleic acid (BNA)
  modified_base 13: mod_base = OTHER; note = bicyclic nucleic acid (BNA)
  modified_base 18: mod_base = OTHER; note = bicyclic nucleic acid (BNA)
  source 1..18: mol_type = other RNA
ctgtccaagcccggttga

SEQ ID NO: 15940 - RNA, 18 nt, synthetic construct
  misc_feature 1..18: note = Description of Artificial Sequence: Synthetic Antisense oligonucleotide
  modified_base 1: mod_base = OTHER; note = bicyclic nucleic acid (BNA)
  modified_base 13..14: mod_base = OTHER; note = bicyclic nucleic acid (BNA)
  modified_base 18: mod_base = OTHER; note = bicyclic nucleic acid (BNA)
  source 1..18: mol_type = other RNA
ctgtccaagcccggttga

SEQ ID NO: 15941 - RNA, 18 nt, synthetic construct
  misc_feature 1..18: note = Description of Artificial Sequence: Synthetic Antisense oligonucleotide
  modified_base 1: mod_base = OTHER; note = bicyclic nucleic acid (BNA)
  modified_base 6: mod_base = OTHER; note = bicyclic nucleic acid (BNA)
  modified_base 13: mod_base = OTHER; note = bicyclic nucleic acid (BNA)
  modified_base 18: mod_base = OTHER; note = bicyclic nucleic acid (BNA)
  source 1..18: mol_type = other RNA
ctgtccaagcccggttga

SEQ ID NO: 15942 - RNA, 18 nt, synthetic construct
  misc_feature 1..18: note = Description of Artificial Sequence: Synthetic Antisense oligonucleotide
  modified_base 1: mod_base = OTHER; note = bicyclic nucleic acid (BNA)
  modified_base 5..6: mod_base = OTHER; note = bicyclic nucleic acid (BNA)
  modified_base 13: mod_base = OTHER; note = bicyclic nucleic acid (BNA)
  modified_base 18: mod_base = OTHER; note = bicyclic nucleic acid (BNA)
  source 1..18: mol_type = other RNA
ctgtccaagcccggttga

SEQ ID NO: 15943 - RNA, 18 nt, synthetic construct
  misc_feature 1..18: note = Description of Artificial Sequence: Synthetic Antisense oligonucleotide
  modified_base 1: mod_base = OTHER; note = bicyclic nucleic acid (BNA)
  modified_base 5: mod_base = OTHER; note = bicyclic nucleic acid (BNA)
  modified_base 13: mod_base = OTHER; note = bicyclic nucleic acid (BNA)
  modified_base 18: mod_base = OTHER; note = bicyclic nucleic acid (BNA)
  source 1..18: mol_type = other RNA
ctgtccaagcccggttga

SEQ ID NO: 15944 - RNA, 18 nt, synthetic construct
  misc_feature 1..18: note = Description of Artificial Sequence: Synthetic Antisense oligonucleotide
  modified_base 1: mod_base = OTHER; note = bicyclic nucleic acid (BNA)
  modified_base 9: mod_base = OTHER; note = bicyclic nucleic acid (BNA)
  modified_base 13: mod_base = OTHER; note = bicyclic nucleic acid (BNA)
  modified_base 18: mod_base = OTHER; note = bicyclic nucleic acid (BNA)
  source 1..18: mol_type = other RNA
ctgtccaagcccggttga

SEQ ID NO: 15945 - RNA, 18 nt, synthetic construct
  misc_feature 1..18: note = Description of Artificial Sequence: Synthetic Antisense oligonucleotide
  modified_base 1: mod_base = OTHER; note = bicyclic nucleic acid (BNA)
  modified_base 9: mod_base = OTHER; note = bicyclic nucleic acid (BNA)
  modified_base 14: mod_base = OTHER; note = bicyclic nucleic acid (BNA)
  modified_base 18: mod_base = OTHER; note = bicyclic nucleic acid (BNA)
  source 1..18: mol_type = other RNA
ctgtccaagcccggttga

SEQ ID NO: 15946 - DNA, 15 bp, synthetic construct
  misc_feature 1..15: note = Description of Artificial Sequence: Synthetic Antisense oligonucleotide
  misc_feature 1..15: note = Original Sequence: taaguucuguccaag
  modified_base 1: mod_base = OTHER; note = bicyclic nucleic acid (BNA)
  modified_base 15: mod_base = OTHER; note = bicyclic nucleic acid (BNA)
  source 1..15: mol_type = other DNA
  modified_base 5: mod_base = OTHER; note = Uracil
  modified_base 6: mod_base = OTHER; note = Uracil
  modified_base 8: mod_base = OTHER; note = Uracil
  modified_base 10: mod_base = OTHER; note = Uracil
taagttctgtccaag

SEQ ID NO: 15947 - DNA, 15 bp, synthetic construct
  misc_feature 1..15: note = Description of Artificial Sequence: Synthetic Antisense oligonucleotide
  misc_feature 1..15: note = Original Sequence: taaguucuguccaag
  modified_base 1: mod_base = OTHER; note = bicyclic nucleic acid (BNA)
  modified_base 4: mod_base = OTHER; note = bicyclic nucleic acid (BNA)
  modified_base 15: mod_base = OTHER; note = bicyclic nucleic acid (BNA)
  source 1..15: mol_type = other DNA
  modified_base 5: mod_base = OTHER; note = Uracil
  modified_base 6: mod_base = OTHER; note = Uracil
  modified_base 8: mod_base = OTHER; note = Uracil
  modified_base 10: mod_base = OTHER; note = Uracil
taagttctgtccaag

SEQ ID NO: 15948 - DNA, 20 bp, synthetic construct
  misc_feature 1..20: note = Description of Artificial Sequence: Synthetic Antisense oligonucleotide
  misc_feature 1..20: note = Original Sequence: tcaaggaagauggcauuucu
  modified_base 1: mod_base = OTHER; note = bicyclic nucleic acid (BNA)
  source 1..20: mol_type = other DNA
  modified_base 11: mod_base = OTHER; note = Uracil
  modified_base 16: mod_base = OTHER; note = Uracil
  modified_base 17: mod_base = OTHER; note = Uracil
  modified_base 18: mod_base = OTHER; note = Uracil
  modified_base 20: mod_base = OTHER; note = Uracil
tcaaggaagatggcatttct

SEQ ID NO: 15949 - RNA, 20 nt, synthetic construct
  misc_feature 1..20: note = Description of Artificial Sequence: Synthetic Antisense oligonucleotide
  modified_base 5: mod_base = OTHER; note = bicyclic nucleic acid (BNA)
  source 1..20: mol_type = other RNA
tcaaggaagatggcatttct

SEQ ID NO: 15950 - DNA, 20 bp, synthetic construct
  misc_feature 1..20: note = Description of Artificial Sequence: Synthetic Antisense oligonucleotide
  misc_feature 1..20: note = Original Sequence: tcaaggaagauggcauuuct
  modified_base 1: mod_base = OTHER; note = bicyclic nucleic acid (BNA)
  modified_base 20: mod_base = OTHER; note = bicyclic nucleic acid (BNA)
  source 1..20: mol_type = other DNA
  modified_base 11: mod_base = OTHER; note = Uracil
  modified_base 16: mod_base = OTHER; note = Uracil
  modified_base 17: mod_base = OTHER; note = Uracil
  modified_base 18: mod_base = OTHER; note = Uracil
tcaaggaagatggcatttct

SEQ ID NO: 15951 - DNA, 20 bp, synthetic construct
  misc_feature 1..20: note = Description of Artificial Sequence: Synthetic Antisense oligonucleotide
  misc_feature 1..20: note = Original Sequence: tcaaggaagauggcauuucu
  modified_base 1..2: mod_base = OTHER; note = bicyclic nucleic acid (BNA)
  source 1..20: mol_type = other DNA
  modified_base 11: mod_base = OTHER; note = Uracil
  modified_base 16: mod_base = OTHER; note = Uracil
  modified_base 17: mod_base = OTHER; note = Uracil
  modified_base 18: mod_base = OTHER; note = Uracil
  modified_base 20: mod_base = OTHER; note = Uracil
tcaaggaagatggcatttct

SEQ ID NO: 15952 - DNA, 20 bp, synthetic construct
  misc_feature 1..20: note = Description of Artificial Sequence: Synthetic Antisense oligonucleotide
  misc_feature 1..20: note = Original Sequence: tcaaggaagauggcauuucu
  modified_base 1..2: mod_base = OTHER; note = bicyclic nucleic acid (BNA)
  modified_base 13: mod_base = OTHER; note = bicyclic nucleic acid (BNA)
  source 1..20: mol_type = other DNA
  modified_base 11: mod_base = OTHER; note = Uracil
  modified_base 16: mod_base = OTHER; note = Uracil
  modified_base 17: mod_base = OTHER; note = Uracil
  modified_base 18: mod_base = OTHER; note = Uracil
  modified_base 20: mod_base = OTHER; note = Uracil
tcaaggaagatggcatttct

SEQ ID NO: 15953 - DNA, 20 bp, synthetic construct
  misc_feature 1..20: note = Description of Artificial Sequence: Synthetic Antisense oligonucleotide
  misc_feature 1..20: note = Original Sequence: tcaaggaagauggcauuuct
  modified_base 1..2: mod_base = OTHER; note = bicyclic nucleic acid (BNA)
  modified_base 20: mod_base = OTHER; note = bicyclic nucleic acid (BNA)
  source 1..20: mol_type = other DNA
  modified_base 11: mod_base = OTHER; note = Uracil
  modified_base 16: mod_base = OTHER; note = Uracil
  modified_base 17: mod_base = OTHER; note = Uracil
  modified_base 18: mod_base = OTHER; note = Uracil
tcaaggaagatggcatttct

SEQ ID NO: 15954 - DNA, 20 bp, synthetic construct
  misc_feature 1..20: note = Description of Artificial Sequence: Synthetic Antisense oligonucleotide
  misc_feature 1..20: note = Original Sequence: tcaaggaagauggcauuuct
  modified_base 1..2: mod_base = OTHER; note = bicyclic nucleic acid (BNA)
  modified_base 10: mod_base = OTHER; note = bicyclic nucleic acid (BNA)
  modified_base 20: mod_base = OTHER; note = bicyclic nucleic acid (BNA)
  source 1..20: mol_type = other DNA
  modified_base 11: mod_base = OTHER; note = Uracil
  modified_base 16: mod_base = OTHER; note = Uracil
  modified_base 17: mod_base = OTHER; note = Uracil
  modified_base 18: mod_base = OTHER; note = Uracil
tcaaggaagatggcatttct

SEQ ID NO: 15955 - DNA, 20 bp, synthetic construct
  misc_feature 1..20: note = Description of Artificial Sequence: Synthetic Antisense oligonucleotide
  misc_feature 1..20: note = Original Sequence: tcaaggaagauggcauuuct
  modified_base 1: mod_base = OTHER; note = bicyclic nucleic acid (BNA)
  modified_base 7: mod_base = OTHER; note = bicyclic nucleic acid (BNA)
  modified_base 15: mod_base = OTHER; note = bicyclic nucleic acid (BNA)
  modified_base 20: mod_base = OTHER; note = bicyclic nucleic acid (BNA)
  source 1..20: mol_type = other DNA
  modified_base 11: mod_base = OTHER; note = Uracil
  modified_base 16: mod_base = OTHER; note = Uracil
  modified_base 17: mod_base = OTHER; note = Uracil
  modified_base 18: mod_base = OTHER; note = Uracil
tcaaggaagatggcatttct

SEQ ID NO: 15956 - DNA, 20 bp, synthetic construct
  misc_feature 1..20: note = Description of Artificial Sequence: Synthetic Antisense oligonucleotide
  misc_feature 1..20: note = Original Sequence: tcaaggaagauggcauuuct
  modified_base 1..2: mod_base = OTHER; note = bicyclic nucleic acid (BNA)
  modified_base 7: mod_base = OTHER; note = bicyclic nucleic acid (BNA)
  modified_base 15: mod_base = OTHER; note = bicyclic nucleic acid (BNA)
  modified_base 20: mod_base = OTHER; note = bicyclic nucleic acid (BNA)
  source 1..20: mol_type = other DNA
  modified_base 11: mod_base = OTHER; note = Uracil
  modified_base 16: mod_base = OTHER; note = Uracil
  modified_base 17: mod_base = OTHER; note = Uracil
  modified_base 18: mod_base = OTHER; note = Uracil
tcaaggaagatggcatttct

SEQ ID NO: 15957 - DNA, 20 bp, synthetic construct
  misc_feature 1..20: note = Description of Artificial Sequence: Synthetic Antisense oligonucleotide
  misc_feature 1..20: note = Original Sequence: tcaaggaagatggcauuuct
  modified_base 1..2: mod_base = OTHER; note = bicyclic nucleic acid (BNA)
  modified_base 7: mod_base = OTHER; note = bicyclic nucleic acid (BNA)
  modified_base 11: mod_base = OTHER; note = bicyclic nucleic acid (BNA)
  modified_base 15: mod_base = OTHER; note = bicyclic nucleic acid (BNA)
  modified_base 20: mod_base = OTHER; note = bicyclic nucleic acid (BNA)
  source 1..20: mol_type = other DNA
  modified_base 16: mod_base = OTHER; note = Uracil
  modified_base 17: mod_base = OTHER; note = Uracil
  modified_base 18: mod_base = OTHER; note = Uracil
tcaaggaagatggcatttct

SEQ ID NO: 15958 - DNA, 20 bp, synthetic construct
  misc_feature 1..20: note = Description of Artificial Sequence: Synthetic Antisense oligonucleotide
  misc_feature 1..20: note = Original Sequence: tcaaggaagauggcauuuct
  modified_base 1..2: mod_base = OTHER; note = bicyclic nucleic acid (BNA)
  modified_base 6: mod_base = OTHER; note = bicyclic nucleic acid (BNA)
  modified_base 10: mod_base = OTHER; note = bicyclic nucleic acid (BNA)
  modified_base 15: mod_base = OTHER; note = bicyclic nucleic acid (BNA)
  modified_base 20: mod_base = OTHER; note = bicyclic nucleic acid (BNA)
  source 1..20: mol_type = other DNA
  modified_base 11: mod_base = OTHER; note = Uracil
  modified_base 16: mod_base = OTHER; note = Uracil
  modified_base 17: mod_base = OTHER; note = Uracil
  modified_base 18: mod_base = OTHER; note = Uracil
tcaaggaagatggcatttct

SEQ ID NO: 15959 - DNA, 20 bp, synthetic construct
  misc_feature 1..20: note = Description of Artificial Sequence: Synthetic Antisense oligonucleotide
  misc_feature 1..20: note = Original Sequence: tcaaggaagauggcauuuct
  modified_base 1: mod_base = OTHER; note = bicyclic nucleic acid (BNA)
  modified_base 9: mod_base = OTHER; note = bicyclic nucleic acid (BNA)
  modified_base 20: mod_base = OTHER; note = bicyclic nucleic acid (BNA)
  source 1..20: mol_type = other DNA
  modified_base 11: mod_base = OTHER; note = Uracil
  modified_base 16: mod_base = OTHER; note = Uracil
  modified_base 17: mod_base = OTHER; note = Uracil
  modified_base 18: mod_base = OTHER; note = Uracil
tcaaggaagatggcatttct

SEQ ID NO: 15960 - DNA, 20 bp, synthetic construct
  misc_feature 1..20: note = Description of Artificial Sequence: Synthetic Antisense oligonucleotide
  misc_feature 1..20: note = Original Sequence: tcaaggaagauggcauuuct
  modified_base 1: mod_base = OTHER; note = bicyclic nucleic acid (BNA)
  modified_base 13: mod_base = OTHER; note = bicyclic nucleic acid (BNA)
  modified_base 20: mod_base = OTHER; note = bicyclic nucleic acid (BNA)
  source 1..20: mol_type = other DNA
  modified_base 11: mod_base = OTHER; note = Uracil
  modified_base 16: mod_base = OTHER; note = Uracil
  modified_base 17: mod_base = OTHER; note = Uracil
  modified_base 18: mod_base = OTHER; note = Uracil
tcaaggaagatggcatttct

SEQ ID NO: 15961 - DNA, 20 bp, synthetic construct
  misc_feature 1..20: note = Description of Artificial Sequence: Synthetic Antisense oligonucleotide
  misc_feature 1..20: note = Original Sequence: tcaaggaagauggcauuuct
  modified_base 1: mod_base = OTHER; note = bicyclic nucleic acid (BNA)
  modified_base 9: mod_base = OTHER; note = bicyclic nucleic acid (BNA)
  modified_base 13: mod_base = OTHER; note = bicyclic nucleic acid (BNA)
  modified_base 20: mod_base = OTHER; note = bicyclic nucleic acid (BNA)
  source 1..20: mol_type = other DNA
  modified_base 11: mod_base = OTHER; note = Uracil
  modified_base 16: mod_base = OTHER; note = Uracil
  modified_base 17: mod_base = OTHER; note = Uracil
  modified_base 18: mod_base = OTHER; note = Uracil
tcaaggaagatggcatttct

SEQ ID NO: 15962 - DNA, 20 bp, synthetic construct
  misc_feature 1..20: note = Description of Artificial Sequence: Synthetic Antisense oligonucleotide
  misc_feature 1..20: note = Original Sequence: tcaaggaagauggcauuuct
  modified_base 1: mod_base = OTHER; note = bicyclic nucleic acid (BNA)
  modified_base 6: mod_base = OTHER; note = bicyclic nucleic acid (BNA)
  modified_base 9: mod_base = OTHER; note = bicyclic nucleic acid (BNA)
  modified_base 13: mod_base = OTHER; note = bicyclic nucleic acid (BNA)
  modified_base 20: mod_base = OTHER; note = bicyclic nucleic acid (BNA)
  source 1..20: mol_type = other DNA
  modified_base 11: mod_base = OTHER; note = Uracil
  modified_base 16: mod_base = OTHER; note = Uracil
  modified_base 17: mod_base = OTHER; note = Uracil
  modified_base 18: mod_base = OTHER; note = Uracil
tcaaggaagatggcatttct

SEQ ID NO: 15963 - DNA, 22 bp, synthetic construct
  misc_feature 1..22: note = Description of Artificial Sequence: Synthetic Antisense oligonucleotide
  misc_feature 1..22: note = Original Sequence: tcaaggaagauggcauuucuag
  modified_base 1: mod_base = OTHER; note = bicyclic nucleic acid (BNA)
  source 1..22: mol_type = other DNA
  modified_base 11: mod_base = OTHER; note = Uracil
  modified_base 16: mod_base = OTHER; note = Uracil
  modified_base 17: mod_base = OTHER; note = Uracil
  modified_base 18: mod_base = OTHER; note = Uracil
  modified_base 20: mod_base = OTHER; note = Uracil
tcaaggaagatggcatttctag

SEQ ID NO: 15964 - DNA, 22 bp, synthetic construct
  misc_feature 1..22: note = Description of Artificial Sequence: Synthetic Antisense oligonucleotide
  misc_feature 1..22: note = Original Sequence: tcaaggaagauggcauuucuag
  modified_base 1..2: mod_base = OTHER; note = bicyclic nucleic acid (BNA)
  source 1..22: mol_type = other DNA
  modified_base 11: mod_base = OTHER; note = Uracil
  modified_base 16: mod_base = OTHER; note = Uracil
  modified_base 17: mod_base = OTHER; note = Uracil
  modified_base 18: mod_base = OTHER; note = Uracil
  modified_base 20: mod_base = OTHER; note = Uracil
tcaaggaagatggcatttctag

SEQ ID NO: 15965 - DNA, 22 bp, synthetic construct
  misc_feature 1..22: note = Description of Artificial Sequence: Synthetic Antisense oligonucleotide
  misc_feature 1..22: note = Original Sequence: tcaaggaagauggcauuucuag
  modified_base 1: mod_base = OTHER; note = bicyclic nucleic acid (BNA)
  modified_base 22: mod_base = OTHER; note = bicyclic nucleic acid (BNA)
  source 1..22: mol_type = other DNA
  modified_base 11: mod_base = OTHER; note = Uracil
  modified_base 16: mod_base = OTHER; note = Uracil
  modified_base 17: mod_base = OTHER; note = Uracil
  modified_base 18: mod_base = OTHER; note = Uracil
  modified_base 20: mod_base = OTHER; note = Uracil
tcaaggaagatggcatttctag

SEQ ID NO: 15966 - DNA, 22 bp, synthetic construct
  misc_feature 1..22: note = Description of Artificial Sequence: Synthetic Antisense oligonucleotide
  misc_feature 1..22: note = Original Sequence: tcaaggaagauggcauuucuag
  modified_base 1..2: mod_base = OTHER; note = bicyclic nucleic acid (BNA)
  modified_base 22: mod_base = OTHER; note = bicyclic nucleic acid (BNA)
  source 1..22: mol_type = other DNA
  modified_base 11: mod_base = OTHER; note = Uracil
  modified_base 16: mod_base = OTHER; note = Uracil
  modified_base 17: mod_base = OTHER; note = Uracil
  modified_base 18: mod_base = OTHER; note = Uracil
  modified_base 20: mod_base = OTHER; note = Uracil
tcaaggaagatggcatttctag

SEQ ID NO: 15967 - DNA, 22 bp, synthetic construct
  misc_feature 1..22: note = Description of Artificial Sequence: Synthetic Antisense oligonucleotide
  misc_feature 1..22: note = Original Sequence: tcaaggaagauggcauuucuag
  modified_base 1..2: mod_base = OTHER; note = bicyclic nucleic acid (BNA)
  modified_base 10: mod_base = OTHER; note = bicyclic nucleic acid (BNA)
  modified_base 22: mod_base = OTHER; note = bicyclic nucleic acid (BNA)
  source 1..22: mol_type = other DNA
  modified_base 11: mod_base = OTHER; note = Uracil
  modified_base 16: mod_base = OTHER; note = Uracil
  modified_base 17: mod_base = OTHER; note = Uracil
  modified_base 18: mod_base = OTHER; note = Uracil
  modified_base 20: mod_base = OTHER; note = Uracil
tcaaggaagatggcatttctag

SEQ ID NO: 15968 - DNA, 22 bp, synthetic construct
  misc_feature 1..22: note = Description of Artificial Sequence: Synthetic Antisense oligonucleotide
  misc_feature 1..22: note = Original Sequence: tcaaggaagauggcauuucuag
  modified_base 1..2: mod_base = OTHER; note = bicyclic nucleic acid (BNA)
  modified_base 10: mod_base = OTHER; note = bicyclic nucleic acid (BNA)
  modified_base 15: mod_base = OTHER; note = bicyclic nucleic acid (BNA)
  modified_base 22: mod_base = OTHER; note = bicyclic nucleic acid (BNA)
  source 1..22: mol_type = other DNA
  modified_base 11: mod_base = OTHER; note = Uracil
  modified_base 16: mod_base = OTHER; note = Uracil
  modified_base 17: mod_base = OTHER; note = Uracil
  modified_base 18: mod_base = OTHER; note = Uracil
  modified_base 20: mod_base = OTHER; note = Uracil
tcaaggaagatggcatttctag

SEQ ID NO: 15969 - DNA, 22 bp, synthetic construct
  misc_feature 1..22: note = Description of Artificial Sequence: Synthetic Antisense oligonucleotide
  misc_feature 1..22: note = Original Sequence: tcaaggaagauggcauuucuag
  modified_base 1..2: mod_base = OTHER; note = bicyclic nucleic acid (BNA)
  modified_base 13: mod_base = OTHER; note = bicyclic nucleic acid (BNA)
  modified_base 22: mod_base = OTHER; note = bicyclic nucleic acid (BNA)
  source 1..22: mol_type = other DNA
  modified_base 11: mod_base = OTHER; note = Uracil
  modified_base 16: mod_base = OTHER; note = Uracil
  modified_base 17: mod_base = OTHER; note = Uracil
  modified_base 18: mod_base = OTHER; note = Uracil
  modified_base 20: mod_base = OTHER; note = Uracil
tcaaggaagatggcatttctag

SEQ ID NO: 15970 - DNA, 22 bp, synthetic construct
  misc_feature 1..22: note = Description of Artificial Sequence: Synthetic Antisense oligonucleotide
  misc_feature 1..22: note = Original Sequence: tcaaggaagauggcauuucuag
  modified_base 1..2: mod_base = OTHER; note = bicyclic nucleic acid (BNA)
  modified_base 9: mod_base = OTHER; note = bicyclic nucleic acid (BNA)
  modified_base 22: mod_base = OTHER; note = bicyclic nucleic acid (BNA)
  source 1..22: mol_type = other DNA
  modified_base 11: mod_base = OTHER; note = Uracil
  modified_base 16: mod_base = OTHER; note = Uracil
  modified_base 17: mod_base = OTHER; note = Uracil
  modified_base 18: mod_base = OTHER; note = Uracil
  modified_base 20: mod_base = OTHER; note = Uracil
tcaaggaagatggcatttctag

SEQ ID NO: 15971 - DNA, 22 bp, synthetic construct
  misc_feature 1..22: note = Description of Artificial Sequence: Synthetic Antisense oligonucleotide
  misc_feature 1..22: note = Original Sequence: tcaaggaagauggcauuucuag
  modified_base 1..2: mod_base = OTHER; note = bicyclic nucleic acid (BNA)
  modified_base 9: mod_base = OTHER; note = bicyclic nucleic acid (BNA)
  modified_base 13: mod_base = OTHER; note = bicyclic nucleic acid (BNA)
  modified_base 22: mod_base = OTHER; note = bicyclic nucleic acid (BNA)
  source 1..22: mol_type = other DNA
  modified_base 11: mod_base = OTHER; note = Uracil
  modified_base 16: mod_base = OTHER; note = Uracil
  modified_base 17: mod_base = OTHER; note = Uracil
  modified_base 18: mod_base = OTHER; note = Uracil
  modified_base 20: mod_base = OTHER; note = Uracil
tcaaggaagatggcatttctag

SEQ ID NO: 15972 - DNA, 22 bp, synthetic construct
  misc_feature 1..22: note = Description of Artificial Sequence: Synthetic Antisense oligonucleotide
  misc_feature 1..22: note = Original Sequence: tcaaggaagauggcauuucuag
  modified_base 1..2: mod_base = OTHER; note = bicyclic nucleic acid (BNA)
  modified_base 5: mod_base = OTHER; note = bicyclic nucleic acid (BNA)
  modified_base 9: mod_base = OTHER; note = bicyclic nucleic acid (BNA)
  modified_base 13: mod_base = OTHER; note = bicyclic nucleic acid (BNA)
  modified_base 22: mod_base = OTHER; note = bicyclic nucleic acid (BNA)
  source 1..22: mol_type = other DNA
  modified_base 11: mod_base = OTHER; note = Uracil
  modified_base 16: mod_base = OTHER; note = Uracil
  modified_base 17: mod_base = OTHER; note = Uracil
  modified_base 18: mod_base = OTHER; note = Uracil
  modified_base 20: mod_base = OTHER; note = Uracil
tcaaggaagatggcatttctag

SEQ ID NO: 15973 - DNA, 16 bp, synthetic construct
  misc_feature 1..16: note = Description of Artificial Sequence: Synthetic Antisense oligonucleotide
  misc_feature 1..16: note = Original Sequence: tcaaggaagauggcat
  modified_base 1: mod_base = OTHER; note = bicyclic nucleic acid (BNA)
  modified_base 16: mod_base = OTHER; note = bicyclic nucleic acid (BNA)
  source 1..16: mol_type = other DNA
  modified_base 11: mod_base = OTHER; note = Uracil
tcaaggaagatggcat

SEQ ID NO: 15974 - DNA, 16 bp, synthetic construct
  misc_feature 1..16: note = Description of Artificial Sequence: Synthetic Antisense oligonucleotide
  misc_feature 1..16: note = Original Sequence: tcaaggaagauggcat
  modified_base 1: mod_base = OTHER; note = bicyclic nucleic acid (BNA)
  modified_base 13: mod_base = OTHER; note = bicyclic nucleic acid (BNA)
  modified_base 16: mod_base = OTHER; note = bicyclic nucleic acid (BNA)
  source 1..16: mol_type = other DNA
  modified_base 11: mod_base = OTHER; note = Uracil
tcaaggaagatggcat

SEQ ID NO: 15975 - RNA, 16 nt, synthetic construct
  misc_feature 1..16: note = Description of Artificial Sequence: Synthetic Antisense oligonucleotide
  modified_base 13: mod_base = OTHER; note = bicyclic nucleic acid (BNA)
  source 1..16: mol_type = other RNA
tcaaggaagatggcat

SEQ ID NO: 15976 - DNA, 15 bp, synthetic construct
  misc_feature 1..15: note = Description of Artificial Sequence: Synthetic Antisense oligonucleotide
  misc_feature 1..15: note = Original Sequence: gaagauggcauuuct
  modified_base 1: mod_base = OTHER; note = bicyclic nucleic acid (BNA)
  modified_base 8: mod_base = OTHER; note = bicyclic nucleic acid (BNA)
  modified_base 15: mod_base = OTHER; note = bicyclic nucleic acid (BNA)
  source 1..15: mol_type = other DNA
  modified_base 6: mod_base = OTHER; note = Uracil
  modified_base 11: mod_base = OTHER; note = Uracil
  modified_base 12: mod_base = OTHER; note = Uracil
  modified_base 13: mod_base = OTHER; note = Uracil
gaagatggcatttct

SEQ ID NO: 15977 - RNA, 18 nt, synthetic construct
  misc_feature 1..18: note = Description of Artificial Sequence: Synthetic Antisense oligonucleotide
  modified_base 1: mod_base = OTHER; note = bicyclic nucleic acid (BNA)
  modified_base 18: mod_base = OTHER; note = bicyclic nucleic acid (BNA)
  modified_base 9: mod_base = OTHER; note = 5-methyl
  modified_base 13..14: mod_base = OTHER; note = 5-methyl
  modified_base 18: mod_base = OTHER; note = 5-methyl
  source 1..18: mol_type = other RNA
ggtaagttctgtccaagc

SEQ ID NO: 15978 - DNA, 18 bp, synthetic construct
  misc_feature 1..18: note = Description of Artificial Sequence: Synthetic Antisense oligonucleotide
  misc_feature 1..18: note = Original Sequence: gguaaguuctguccaagc
  modified_base 1..2: mod_base = OTHER; note = bicyclic nucleic acid (BNA)
  modified_base 10: mod_base = OTHER; note = bicyclic nucleic acid (BNA)
  modified_base 18: mod_base = OTHER; note = bicyclic nucleic acid (BNA)
  modified_base 9: mod_base = OTHER; note = 5-methyl
  modified_base 13..14: mod_base = OTHER; note = 5-methyl
  modified_base 18: mod_base = OTHER; note = 5-methyl
  source 1..18: mol_type = other DNA
  modified_base 3: mod_base = OTHER; note = Uracil
  modified_base 7: mod_base = OTHER; note = Uracil
  modified_base 8: mod_base = OTHER; note = Uracil
  modified_base 12: mod_base = OTHER; note = Uracil
ggtaagttctgtccaagc

SEQ ID NO: 15979 - RNA, 18 nt, synthetic construct
  misc_feature 1..18: note = Description of Artificial Sequence: Synthetic Antisense oligonucleotide
  modified_base 1..2: mod_base = OTHER; note = bicyclic nucleic acid (BNA)
  modified_base 17..18: mod_base = OTHER; note = bicyclic nucleic acid (BNA)
  modified_base 9: mod_base = OTHER; note = 5-methyl
  modified_base 13..14: mod_base = OTHER; note = 5-methyl
  modified_base 18: mod_base = OTHER; note = 5-methyl
  source 1..18: mol_type = other RNA
ggtaagttctgtccaagc

SEQ ID NO: 15980 - RNA, 18 nt, synthetic construct
  misc_feature 1..18: note = Description of Artificial Sequence: Synthetic Antisense oligonucleotide
  modified_base 1..2: mod_base = OTHER; note = bicyclic nucleic acid (BNA)
  modified_base 6: mod_base = OTHER; note = bicyclic nucleic acid (BNA)
  modified_base 18: mod_base = OTHER; note = bicyclic nucleic acid (BNA)
  modified_base 9: mod_base = OTHER; note = 5-methyl
  modified_base 13..14: mod_base = OTHER; note = 5-methyl
  modified_base 18: mod_base = OTHER; note = 5-methyl
  source 1..18: mol_type = other RNA
ggtaagttctgtccaagc

SEQ ID NO: 15981 - RNA, 18 nt, synthetic construct
  misc_feature 1..18: note = Description of Artificial Sequence: Synthetic Antisense oligonucleotide
  modified_base 1..2: mod_base = OTHER; note = bicyclic nucleic acid (BNA)
  modified_base 11: mod_base = OTHER; note = bicyclic nucleic acid (BNA)
  modified_base 18: mod_base = OTHER; note = bicyclic nucleic acid (BNA)
  modified_base 9: mod_base = OTHER; note = 5-methyl
  modified_base 13..14: mod_base = OTHER; note = 5-methyl
  modified_base 18: mod_base = OTHER; note = 5-methyl
  source 1..18: mol_type = other RNA
ggtaagttctgtccaagc

SEQ ID NO: 15982 - RNA, 18 nt, synthetic construct
  misc_feature 1..18: note = Description of Artificial Sequence: Synthetic Antisense oligonucleotide
  modified_base 1..2: mod_base = OTHER; note = bicyclic nucleic acid (BNA)
  modified_base 6: mod_base = OTHER; note = bicyclic nucleic acid (BNA)
  modified_base 11: mod_base = OTHER; note = bicyclic nucleic acid (BNA)
  modified_base 18: mod_base = OTHER; note = bicyclic nucleic acid (BNA)
  modified_base 9: mod_base = OTHER; note = 5-methyl
  modified_base 13..14: mod_base = OTHER; note = 5-methyl
  modified_base 18: mod_base = OTHER; note = 5-methyl
  source 1..18: mol_type = other RNA
ggtaagttctgtccaagc

SEQ ID NO: 15983 - RNA, 18 nt, synthetic construct
  misc_feature 1..18: note = Description of Artificial Sequence: Synthetic Antisense oligonucleotide
  modified_base 1..2: mod_base = OTHER; note = bicyclic nucleic acid (BNA)
  modified_base 6: mod_base = OTHER; note = bicyclic nucleic acid (BNA)
  modified_base 11: mod_base = OTHER; note = bicyclic nucleic acid (BNA)
  modified_base 17..18: mod_base = OTHER; note = bicyclic nucleic acid (BNA)
  modified_base 9: mod_base = OTHER; note = 5-methyl
  modified_base 13..14: mod_base = OTHER; note = 5-methyl
  modified_base 18: mod_base = OTHER; note = 5-methyl
  source 1..18: mol_type = other RNA
ggtaagttctgtccaagc

SEQ ID NO: 15984 - RNA, 18 nt, synthetic construct
  misc_feature 1..18: note = Description of Artificial Sequence: Synthetic Antisense oligonucleotide
  modified_base 1..2: mod_base = OTHER; note = bicyclic nucleic acid (BNA)
  modified_base 18: mod_base = OTHER; note = bicyclic nucleic acid (BNA)
  modified_base 9: mod_base = OTHER; note = 5-methyl
  modified_base 13..14: mod_base = OTHER; note = 5-methyl
  modified_base 18: mod_base = OTHER; note = 5-methyl
  source 1..18: mol_type = other RNA
ggtaagttctgtccaagc

SEQ ID NO: 15985 - RNA, 18 nt, synthetic construct
  misc_feature 1..18: note = Description of Artificial Sequence: Synthetic Antisense oligonucleotide
  modified_base 1: mod_base = OTHER; note = bicyclic nucleic acid (BNA)
  modified_base 6: mod_base = OTHER; note = bicyclic nucleic acid (BNA)
  modified_base 18: mod_base = OTHER; note = bicyclic nucleic acid (BNA)
  modified_base 9: mod_base = OTHER; note = 5-methyl
  modified_base 13..14: mod_base = OTHER; note = 5-methyl
  modified_base 18: mod_base = OTHER; note = 5-methyl
  source 1..18: mol_type = other RNA
ggtaagttctgtccaagc

SEQ ID NO: 15986 - RNA, 18 nt, synthetic construct
  misc_feature 1..18: note = Description of Artificial Sequence: Synthetic Antisense oligonucleotide
  modified_base 1: mod_base = OTHER; note = bicyclic nucleic acid (BNA)
  modified_base 11: mod_base = OTHER; note = bicyclic nucleic acid (BNA)
  modified_base 18: mod_base = OTHER; note = bicyclic nucleic acid (BNA)
  modified_base 9: mod_base = OTHER; note = 5-methyl
  modified_base 13..14: mod_base = OTHER; note = 5-methyl
  modified_base 18: mod_base = OTHER; note = 5-methyl
  source 1..18: mol_type = other RNA
ggtaagttctgtccaagc

SEQ ID NO: 15987 - RNA, 18 nt, synthetic construct
  misc_feature 1..18: note = Description of Artificial Sequence: Synthetic Antisense oligonucleotide
  modified_base 1: mod_base = OTHER; note = bicyclic nucleic acid (BNA)
  modified_base 9: mod_base = OTHER; note = bicyclic nucleic acid (BNA)
  modified_base 18: mod_base = OTHER; note = bicyclic nucleic acid (BNA)
  modified_base 9: mod_base = OTHER; note = 5-methyl
  modified_base 13..14: mod_base = OTHER; note = 5-methyl
  modified_base 18: mod_base = OTHER; note = 5-methyl
  source 1..18: mol_type = other RNA
ggtaagttctgtccaagc

SEQ ID NO: 15988 - RNA, 18 nt, synthetic construct
  misc_feature 1..18: note = Description of Artificial Sequence: Synthetic Antisense oligonucleotide
  modified_base 1: mod_base = OTHER; note = bicyclic nucleic acid (BNA)
  modified_base 18: mod_base = OTHER; note = bicyclic nucleic acid (BNA)
  modified_base 9: mod_base = OTHER; note = 5-methyl
  modified_base 13..14: mod_base = OTHER; note = 5-methyl
  modified_base 18: mod_base = OTHER; note = 5-methyl
  source 1..18: mol_type = other RNA
ggtaagttctgtccaagc

SEQ ID NO: 15989 - RNA, 18 nt, synthetic construct
  misc_feature 1..18: note = Description of Artificial Sequence: Synthetic Antisense oligonucleotide
  modified_base 1: mod_base = OTHER; note = bicyclic nucleic acid (BNA)
  modified_base 5: mod_base = OTHER; note = bicyclic nucleic acid (BNA)
  modified_base 18: mod_base = OTHER; note = bicyclic nucleic acid (BNA)
  modified_base 8: mod_base = OTHER; note = 5-methyl
  modified_base 12..13: mod_base = OTHER; note = 5-methyl
  modified_base 17..18: mod_base = OTHER; note = 5-methyl
  source 1..18: mol_type = other RNA
gtaagttctgtccaagcc

SEQ ID NO: 15990 - RNA, 18 nt, synthetic construct
  misc_feature 1..18: note = Description of Artificial Sequence: Synthetic Antisense oligonucleotide
  modified_base 1: mod_base = OTHER; note = bicyclic nucleic acid (BNA)
  modified_base 18: mod_base = OTHER; note = bicyclic nucleic acid (BNA)
  modified_base 8: mod_base = OTHER; note = 5-methyl
  modified_base 12..13: mod_base = OTHER; note = 5-methyl
  modified_base 17..18: mod_base = OTHER; note = 5-methyl
  source 1..18: mol_type = other RNA
gtaagttctgtccaagcc

SEQ ID NO: 15991 - RNA, 18 nt, synthetic construct
  misc_feature 1..18: note = Description of Artificial Sequence: Synthetic Antisense oligonucleotide
  modified_base 1: mod_base = OTHER; note = bicyclic nucleic acid (BNA)
  modified_base 18: mod_base = OTHER; note = bicyclic nucleic acid (BNA)
  modified_base 4: mod_base = OTHER; note = 5-methyl
  modified_base 13: mod_base = OTHER; note = 5-methyl
  modified_base 17..18: mod_base = OTHER; note = 5-methyl
  source 1..18: mol_type = other RNA
agtcggtaagttctgtcc

SEQ ID NO: 15992 - RNA, 18 nt, synthetic construct
  misc_feature 1..18: note = Description of Artificial Sequence: Synthetic Antisense oligonucleotide
  modified_base 1: mod_base = OTHER; note = bicyclic nucleic acid (BNA)
  modified_base 5..6: mod_base = OTHER; note = bicyclic nucleic acid (BNA)
  modified_base 10: mod_base = OTHER; note = bicyclic nucleic acid (BNA)
  modified_base 18: mod_base = OTHER; note = bicyclic nucleic acid (BNA)
  modified_base 4: mod_base = OTHER; note = 5-methyl
  modified_base 13: mod_base = OTHER; note = 5-methyl
  modified_base 17..18: mod_base = OTHER; note = 5-methyl
  source 1..18: mol_type = other RNA
agtcggtaagttctgtcc

SEQ ID NO: 15993 - RNA, 18 nt, synthetic construct
  misc_feature 1..18: note = Description of Artificial Sequence: Synthetic Antisense oligonucleotide
  modified_base 1: mod_base = OTHER; note = bicyclic nucleic acid (BNA)
  modified_base 6: mod_base = OTHER; note = bicyclic nucleic acid (BNA)
  modified_base 10: mod_base = OTHER; note = bicyclic nucleic acid (BNA)
  modified_base 13: mod_base = OTHER; note = bicyclic nucleic acid (BNA)
  modified_base 18: mod_base = OTHER; note = bicyclic nucleic acid (BNA)
  modified_base 4: mod_base = OTHER; note = 5-methyl
  modified_base 13: mod_base = OTHER; note = 5-methyl
  modified_base 17..18: mod_base = OTHER; note = 5-methyl
  source 1..18: mol_type = other RNA
agtcggtaagttctgtcc

SEQ ID NO: 15994 - RNA, 18 nt, synthetic construct
  misc_feature 1..18: note = Description of Artificial Sequence: Synthetic Antisense oligonucleotide
  modified_base 1: mod_base = OTHER; note = bicyclic nucleic acid (BNA)
  modified_base 5: mod_base = OTHER; note = bicyclic nucleic acid (BNA)
  modified_base 10: mod_base = OTHER; note = bicyclic nucleic acid (BNA)
  modified_base 13: mod_base = OTHER; note = bicyclic nucleic acid (BNA)
  modified_base 18: mod_base = OTHER; note = bicyclic nucleic acid (BNA)
  modified_base 4: mod_base = OTHER; note = 5-methyl
  modified_base 13: mod_base = OTHER; note = 5-methyl
  modified_base 17..18: mod_base = OTHER; note = 5-methyl
  source 1..18: mol_type = other RNA
agtcggtaagttctgtcc

SEQ ID NO: 15995 - RNA, 18 nt, synthetic construct
  misc_feature 1..18: note = Description of Artificial Sequence: Synthetic Antisense oligonucleotide
  modified_base 1: mod_base = OTHER; note = bicyclic nucleic acid (BNA)
  modified_base 10: mod_base = OTHER; note = bicyclic nucleic acid (BNA)
  modified_base 13: mod_base = OTHER; note = bicyclic nucleic acid (BNA)
  modified_base 18: mod_base = OTHER; note = bicyclic nucleic acid (BNA)
  modified_base 4: mod_base = OTHER; note = 5-methyl
  modified_base 13: mod_base = OTHER; note = 5-methyl
  modified_base 17..18: mod_base = OTHER; note = 5-methyl
  source 1..18: mol_type = other RNA
agtcggtaagttctgtcc

SEQ ID NO: 15996 - RNA, 18 nt, synthetic construct
  misc_feature 1..18: note = Description of Artificial Sequence: Synthetic Antisense oligonucleotide
  modified_base 1: mod_base = OTHER; note = bicyclic nucleic acid (BNA)
  modified_base 5: mod_base = OTHER; note = bicyclic nucleic acid (BNA)
  modified_base 10: mod_base = OTHER; note = bicyclic nucleic acid (BNA)
  modified_base 18: mod_base = OTHER; note = bicyclic nucleic acid (BNA)
  modified_base 4: mod_base = OTHER; note = 5-methyl
  modified_base 13: mod_base = OTHER; note = 5-methyl
  modified_base 17..18: mod_base = OTHER; note = 5-methyl
  source 1..18: mol_type = other RNA
agtcggtaagttctgtcc

SEQ ID NO: 15997 - RNA, 18 nt, synthetic construct
  misc_feature 1..18: note = Description of Artificial Sequence: Synthetic Antisense oligonucleotide
  modified_base 1: mod_base = OTHER; note = bicyclic nucleic acid (BNA)
  modified_base 5: mod_base = OTHER; note = bicyclic nucleic acid (BNA)
  modified_base 13: mod_base = OTHER; note = bicyclic nucleic acid (BNA)
  modified_base 18: mod_base = OTHER; note = bicyclic nucleic acid (BNA)
  modified_base 4: mod_base = OTHER; note = 5-methyl
  modified_base 13: mod_base = OTHER; note = 5-methyl
  modified_base 17..18: mod_base = OTHER; note = 5-methyl
  source 1..18: mol_type = other RNA
agtcggtaagttctgtcc

SEQ ID NO: 15998 - RNA, 18 nt, synthetic construct
  misc_feature 1..18: note = Description of Artificial Sequence: Synthetic Antisense oligonucleotide
  modified_base 1: mod_base = OTHER; note = bicyclic nucleic acid (BNA)
  modified_base 5..6: mod_base = OTHER; note = bicyclic nucleic acid (BNA)
  modified_base 13: mod_base = OTHER; note = bicyclic nucleic acid (BNA)
  modified_base 18: mod_base = OTHER; note = bicyclic nucleic acid (BNA)
  modified_base 4: mod_base = OTHER; note = 5-methyl
  modified_base 13: mod_base = OTHER; note = 5-methyl
  modified_base 17..18: mod_base = OTHER; note = 5-methyl
  source 1..18: mol_type = other RNA
agtcggtaagttctgtcc

SEQ ID NO: 15999 - RNA, 18 nt, synthetic construct
  misc_feature 1..18: note = Description of Artificial Sequence: Synthetic Antisense oligonucleotide
  modified_base 1: mod_base = OTHER; note = bicyclic nucleic acid (BNA)
  modified_base 5: mod_base = OTHER; note = bicyclic nucleic acid (BNA)
  modified_base 13: mod_base = OTHER; note = bicyclic nucleic acid (BNA)
  modified_base 18: mod_base = OTHER; note = bicyclic nucleic acid (BNA)
  modified_base 4: mod_base = OTHER; note = 5-methyl
  modified_base 13: mod_base = OTHER; note = 5-methyl
  modified_base 17..18: mod_base = OTHER; note = 5-methyl
  source 1..18: mol_type = other RNA
agtcggtaagttctgtcc

SEQ ID NO: 16000 - RNA, 18 nt, synthetic construct
  misc_feature 1..18: note = Description of Artificial Sequence: Synthetic Antisense oligonucleotide
  modified_base 1: mod_base = OTHER; note = bicyclic nucleic acid (BNA)
  modified_base 6: mod_base = OTHER; note = bicyclic nucleic acid (BNA)
  modified_base 13: mod_base = OTHER; note = bicyclic nucleic acid (BNA)
  modified_base 18: mod_base = OTHER; note = bicyclic nucleic acid (BNA)
  modified_base 4: mod_base = OTHER; note = 5-methyl
  modified_base 13: mod_base = OTHER; note = 5-methyl
  modified_base 17..18: mod_base = OTHER; note = 5-methyl
  source 1..18: mol_type = other RNA
agtcggtaagttctgtcc

SEQ ID NO: 16001 - RNA, 18 nt, synthetic construct
  misc_feature 1..18: note = Description of Artificial Sequence: Synthetic Antisense oligonucleotide
  modified_base 1: mod_base = OTHER; note = 5-methyl
  modified_base 5..6: mod_base = OTHER; note = 5-methyl
  modified_base 10..12: mod_base = OTHER; note = 5-methyl
  modified_base 1: mod_base = OTHER; note = bicyclic nucleic acid (BNA)
  modified_base 18: mod_base = OTHER; note = bicyclic nucleic acid (BNA)
  source 1..18: mol_type = other RNA
ctgtccaagcccggttga

SEQ ID NO: 16002 - RNA, 18 nt, synthetic construct
  misc_feature 1..18: note = Description of Artificial Sequence: Synthetic Antisense oligonucleotide
  modified_base 1: mod_base = OTHER; note = 5-methyl
  modified_base 5..6: mod_base = OTHER; note = 5-methyl
  modified_base 10..12: mod_base = OTHER; note = 5-methyl
  modified_base 1: mod_base = OTHER; note = bicyclic nucleic acid (BNA)
  modified_base 9: mod_base = OTHER; note = bicyclic nucleic acid (BNA)
  modified_base 14: mod_base = OTHER; note = bicyclic nucleic acid (BNA)
  modified_base 18: mod_base = OTHER; note = bicyclic nucleic acid (BNA)
  source 1..18: mol_type = other RNA
ctgtccaagcccggttga

SEQ ID NO: 16003 - RNA, 18 nt, synthetic construct
  misc_feature 1..18: note = Description of Artificial Sequence: Synthetic Antisense oligonucleotide
  modified_base 1: mod_base = OTHER; note = 5-methyl
  modified_base 5..6: mod_base = OTHER; note = 5-methyl
  modified_base 10..12: mod_base = OTHER; note = 5-methyl
  modified_base 1: mod_base = OTHER; note = bicyclic nucleic acid (BNA)
  modified_base 9: mod_base = OTHER; note = bicyclic nucleic acid (BNA)
  modified_base 18: mod_base = OTHER; note = bicyclic nucleic acid (BNA)
  source 1..18: mol_type = other RNA
ctgtccaagcccggttga

SEQ ID NO: 16004 - RNA, 18 nt, synthetic construct
  misc_feature 1..18: note = Description of Artificial Sequence: Synthetic Antisense oligonucleotide
  modified_base 1: mod_base = OTHER; note = 5-methyl
  modified_base 5..6: mod_base = OTHER; note = 5-methyl
  modified_base 10..12: mod_base = OTHER; note = 5-methyl
  modified_base 1: mod_base = OTHER; note = bicyclic nucleic acid (BNA)
  modified_base 14: mod_base = OTHER; note = bicyclic nucleic acid (BNA)
  modified_base 18: mod_base = OTHER; note = bicyclic nucleic acid (BNA)
  source 1..18: mol_type = other RNA
ctgtccaagcccggttga

SEQ ID NO: 16005 - RNA, 18 nt, synthetic construct
  misc_feature 1..18: note = Description of Artificial Sequence: Synthetic Antisense oligonucleotide
  modified_base 1: mod_base = OTHER; note = 5-methyl
  modified_base 5..6: mod_base = OTHER; note = 5-methyl
  modified_base 10..12: mod_base = OTHER; note = 5-methyl
  modified_base 1: mod_base = OTHER; note = bicyclic nucleic acid (BNA)
  modified_base 13: mod_base = OTHER; note = bicyclic nucleic acid (BNA)
  modified_base 18: mod_base = OTHER; note = bicyclic nucleic acid (BNA)
  source 1..18: mol_type = other RNA
ctgtccaagcccggttga

SEQ ID NO: 16006 - RNA, 18 nt, synthetic construct
  misc_feature 1..18: note = Description of Artificial Sequence: Synthetic Antisense oligonucleotide
  modified_base 1: mod_base = OTHER; note = 5-methyl
  modified_base 5..6: mod_base = OTHER; note = 5-methyl
  modified_base 10..12: mod_base = OTHER; note = 5-methyl
  modified_base 1: mod_base = OTHER; note = bicyclic nucleic acid (BNA)
  modified_base 13..14: mod_base = OTHER; note = bicyclic nucleic acid (BNA)
  modified_base 18: mod_base = OTHER; note = bicyclic nucleic acid (BNA)
  source 1..18: mol_type = other RNA
ctgtccaagcccggttga

SEQ ID NO: 16007 - RNA, 18 nt, synthetic construct
  misc_feature 1..18: note = Description of Artificial Sequence: Synthetic Antisense oligonucleotide
  modified_base 1: mod_base = OTHER; note = 5-methyl
  modified_base 5..6: mod_base = OTHER; note = 5-methyl
  modified_base 10..12: mod_base = OTHER; note = 5-methyl
  modified_base 1: mod_base = OTHER; note = bicyclic nucleic acid (BNA)
  modified_base 6: mod_base = OTHER; note = bicyclic nucleic acid (BNA)
  modified_base 13: mod_base = OTHER; note = bicyclic nucleic acid (BNA)
  modified_base 18: mod_base = OTHER; note = bicyclic nucleic acid (BNA)
  source 1..18: mol_type = other RNA
ctgtccaagcccggttga

SEQ ID NO: 16008 - RNA, 18 nt, synthetic construct
  misc_feature 1..18: note = Description of Artificial Sequence: Synthetic Antisense oligonucleotide
  modified_base 1: mod_base = OTHER; note = 5-methyl
  modified_base 5..6: mod_base = OTHER; note = 5-methyl
  modified_base 10..12: mod_base = OTHER; note = 5-methyl
  modified_base 1: mod_base = OTHER; note = bicyclic nucleic acid (BNA)
  modified_base 5..6: mod_base = OTHER; note = bicyclic nucleic acid (BNA)
  modified_base 13: mod_base = OTHER; note = bicyclic nucleic acid (BNA)
  modified_base 18: mod_base = OTHER; note = bicyclic nucleic acid (BNA)
  source 1..18: mol_type = other RNA
ctgtccaagcccggttga

SEQ ID NO: 16009 - RNA, 18 nt, synthetic construct
  misc_feature 1..18: note = Description of Artificial Sequence: Synthetic Antisense oligonucleotide
  modified_base 1: mod_base = OTHER; note = 5-methyl
  modified_base 5..6: mod_base = OTHER; note = 5-methyl
  modified_base 10..12: mod_base = OTHER; note = 5-methyl
  modified_base 1: mod_base = OTHER; note = bicyclic nucleic acid (BNA)
  modified_base 5: mod_base = OTHER; note = bicyclic nucleic acid (BNA)
  modified_base 13: mod_base = OTHER; note = bicyclic nucleic acid (BNA)
  modified_base 18: mod_base = OTHER; note = bicyclic nucleic acid (BNA)
  source 1..18: mol_type = other RNA
ctgtccaagcccggttga

SEQ ID NO: 16010 - RNA, 18 nt, synthetic construct
  misc_feature 1..18: note = Description of Artificial Sequence: Synthetic Antisense oligonucleotide
  modified_base 1: mod_base = OTHER; note = 5-methyl
  modified_base 5..6: mod_base = OTHER; note = 5-methyl
  modified_base 10..12: mod_base = OTHER; note = 5-methyl
  modified_base 1: mod_base = OTHER; note = bicyclic nucleic acid (BNA)
  modified_base 9: mod_base = OTHER; note = bicyclic nucleic acid (BNA)
  modified_base 13: mod_base = OTHER; note = bicyclic nucleic acid (BNA)
  modified_base 18: mod_base = OTHER; note = bicyclic nucleic acid (BNA)
  source 1..18: mol_type = other RNA
ctgtccaagcccggttga

SEQ ID NO: 16011 - RNA, 18 nt, synthetic construct
  misc_feature 1..18: note = Description of Artificial Sequence: Synthetic Antisense oligonucleotide
  modified_base 1: mod_base = OTHER; note = 5-methyl
  modified_base 5..6: mod_base = OTHER; note = 5-methyl
  modified_base 10..12: mod_base = OTHER; note = 5-methyl
  modified_base 1: mod_base = OTHER; note = bicyclic nucleic acid (BNA)
  modified_base 9: mod_base = OTHER; note = bicyclic nucleic acid (BNA)
  modified_base 14: mod_base = OTHER; note = bicyclic nucleic acid (BNA)
  modified_base 18: mod_base = OTHER; note = bicyclic nucleic acid (BNA)
  source 1..18: mol_type = other RNA
ctgtccaagcccggttga

SEQ ID NO: 16012 - DNA, 15 bp, synthetic construct
  misc_feature 1..15: note = Description of Artificial Sequence: Synthetic Antisense oligonucleotide
  misc_feature 1..15: note = Original Sequence: taaguucuguccaag
  modified_base 1: mod_base = OTHER; note = bicyclic nucleic acid (BNA)
  modified_base 15: mod_base = OTHER; note = bicyclic nucleic acid (BNA)
  modified_base 7: mod_base = OTHER; note = 5-methyl
  modified_base 11..12: mod_base = OTHER; note = 5-methyl
  source 1..15: mol_type = other DNA
  modified_base 5: mod_base = OTHER; note = Uracil
  modified_base 6: mod_base = OTHER; note = Uracil
  modified_base 8: mod_base = OTHER; note = Uracil
  modified_base 10: mod_base = OTHER; note = Uracil
taagttctgtccaag

SEQ ID NO: 16013 - DNA, 15 bp, synthetic construct
  misc_feature 1..15: note = Description of Artificial Sequence: Synthetic Antisense oligonucleotide
  misc_feature 1..15: note = Original Sequence: taaguucuguccaag
  modified_base 1: mod_base = OTHER; note = bicyclic nucleic acid (BNA)
  modified_base 4: mod_base = OTHER; note = bicyclic nucleic acid (BNA)
  modified_base 15: mod_base = OTHER; note = bicyclic nucleic acid (BNA)
  modified_base 7: mod_base = OTHER; note = 5-methyl
  modified_base 11..12: mod_base = OTHER; note = 5-methyl
  source 1..15: mol_type = other DNA
  modified_base 5: mod_base = OTHER; note = Uracil
  modified_base 6: mod_base = OTHER; note = Uracil
  modified_base 8: mod_base = OTHER; note = Uracil
  modified_base 10: mod_base = OTHER; note = Uracil
taagttctgtccaag

SEQ ID NO: 16014 - DNA, 20 bp, synthetic construct
  misc_feature 1..20: note = Description of Artificial Sequence: Synthetic Antisense oligonucleotide
  misc_feature 1..20: note = Original Sequence: tcaaggaagauggcauuucu
  modified_base 1: mod_base = OTHER; note = bicyclic nucleic acid (BNA)
  modified_base 2: mod_base = OTHER; note = 5-methyl
  modified_base 14: mod_base = OTHER; note = 5-methyl
  modified_base 19: mod_base = OTHER; note = 5-methyl
  source 1..20: mol_type = other DNA
  modified_base 11: mod_base = OTHER; note = Uracil
  modified_base 16: mod_base = OTHER; note = Uracil
  modified_base 17: mod_base = OTHER; note = Uracil
  modified_base 18: mod_base = OTHER; note = Uracil
  modified_base 20: mod_base = OTHER; note = Uracil
tcaaggaagatggcatttct

SEQ ID NO: 16015 - RNA, 20 nt, synthetic construct
  misc_feature 1..20: note = Description of Artificial Sequence: Synthetic Antisense oligonucleotide
  modified_base 2: mod_base = OTHER; note = 5-methyl
  modified_base 14: mod_base = OTHER; note = 5-methyl
  modified_base 19: mod_base = OTHER; note = 5-methyl
  modified_base 5: mod_base = OTHER; note = bicyclic nucleic acid (BNA)
  source 1..20: mol_type = other RNA
tcaaggaagatggcatttct

SEQ ID NO: 16016 - DNA, 20 bp, synthetic construct
  misc_feature 1..20: note = Description of Artificial Sequence: Synthetic Antisense oligonucleotide
  misc_feature 1..20: note = Original Sequence: tcaaggaagauggcauuuct
  modified_base 1: mod_base = OTHER; note = bicyclic nucleic acid (BNA)
  modified_base 20: mod_base = OTHER; note = bicyclic nucleic acid (BNA)
  modified_base 2: mod_base = OTHER; note = 5-methyl
  modified_base 14: mod_base = OTHER; note = 5-methyl
  modified_base 19: mod_base = OTHER; note = 5-methyl
  source 1..20: mol_type = other DNA
  modified_base 11: mod_base = OTHER; note = Uracil
  modified_base 16: mod_base = OTHER; note = Uracil
  modified_base 17: mod_base = OTHER; note = Uracil
  modified_base 18: mod_base = OTHER; note = Uracil
tcaaggaagatggcatttct

SEQ ID NO: 16017 - DNA, 20 bp, synthetic construct
  misc_feature 1..20: note = Description of Artificial Sequence: Synthetic Antisense oligonucleotide
  misc_feature 1..20: note = Original Sequence: tcaaggaagauggcauuucu
  modified_base 1..2: mod_base = OTHER; note = bicyclic nucleic acid (BNA)
  modified_base 2: mod_base = OTHER; note = 5-methyl
  modified_base 14: mod_base = OTHER; note = 5-methyl
  modified_base 19: mod_base = OTHER; note = 5-methyl
  source 1..20: mol_type = other DNA
  modified_base 11: mod_base = OTHER; note = Uracil
  modified_base 16: mod_base = OTHER; note = Uracil
  modified_base 17: mod_base = OTHER; note = Uracil
  modified_base 18: mod_base = OTHER; note = Uracil
  modified_base 20: mod_base = OTHER; note = Uracil
tcaaggaagatggcatttct

SEQ ID NO: 16018 - DNA, 20 bp, synthetic construct
  misc_feature 1..20: note = Description of Artificial Sequence: Synthetic Antisense oligonucleotide
  misc_feature 1..20: note = Original Sequence: tcaaggaagauggcauuucu
  modified_base 1..2: mod_base = OTHER; note = bicyclic nucleic acid (BNA)
  modified_base 13: mod_base = OTHER; note = bicyclic nucleic acid (BNA)
  modified_base 2: mod_base = OTHER; note = 5-methyl
  modified_base 14: mod_base = OTHER; note = 5-methyl
  modified_base 19: mod_base = OTHER; note = 5-methyl
  source 1..20: mol_type = other DNA
  modified_base 11: mod_base = OTHER; note = Uracil
  modified_base 16: mod_base = OTHER; note = Uracil
  modified_base 17: mod_base = OTHER; note = Uracil
  modified_base 18: mod_base = OTHER; note = Uracil
  modified_base 20: mod_base = OTHER; note = Uracil
tcaaggaagatggcatttct

SEQ ID NO: 16019 - DNA, 20 bp, synthetic construct
  misc_feature 1..20: note = Description of Artificial Sequence: Synthetic Antisense oligonucleotide
  misc_feature 1..20: note = Original Sequence: tcaaggaagauggcauuuct
  modified_base 1..2: mod_base = OTHER; note = bicyclic nucleic acid (BNA)
  modified_base 20: mod_base = OTHER; note = bicyclic nucleic acid (BNA)
  modified_base 2: mod_base = OTHER; note = 5-methyl
  modified_base 14: mod_base = OTHER; note = 5-methyl
  modified_base 19: mod_base = OTHER; note = 5-methyl
  source 1..20: mol_type = other DNA
  modified_base 11: mod_base = OTHER; note = Uracil
  modified_base 16: mod_base = OTHER; note = Uracil
  modified_base 17: mod_base = OTHER; note = Uracil
  modified_base 18: mod_base = OTHER; note = Uracil
tcaaggaagatggcatttct

SEQ ID NO: 16020 - DNA, 20 bp, synthetic construct
  misc_feature 1..20: note = Description of Artificial Sequence: Synthetic Antisense oligonucleotide
  misc_feature 1..20: note = Original Sequence: tcaaggaagauggcauuuct
  modified_base 1..2: mod_base = OTHER; note = bicyclic nucleic acid (BNA)
  modified_base 10: mod_base = OTHER; note = bicyclic nucleic acid (BNA)
  modified_base 20: mod_base = OTHER; note = bicyclic nucleic acid (BNA)
  modified_base 2: mod_base = OTHER; note = 5-methyl
  modified_base 14: mod_base = OTHER; note = 5-methyl
  modified_base 19: mod_base = OTHER; note = 5-methyl
  source 1..20: mol_type = other DNA
  modified_base 11: mod_base = OTHER; note = Uracil
  modified_base 16: mod_base = OTHER; note = Uracil
  modified_base 17: mod_base = OTHER; note = Uracil
  modified_base 18: mod_base = OTHER; note = Uracil
tcaaggaagatggcatttct

SEQ ID NO: 16021 - DNA, 20 bp, synthetic construct
  misc_feature 1..20: note = Description of Artificial Sequence: Synthetic Antisense oligonucleotide
  misc_feature 1..20: note = Original Sequence: tcaaggaagauggcauuuct
  modified_base 1: mod_base = OTHER; note = bicyclic nucleic acid (BNA)
  modified_base 7: mod_base = OTHER; note = bicyclic nucleic acid (BNA)
  modified_base 15: mod_base = OTHER; note = bicyclic nucleic acid (BNA)
  modified_base 20: mod_base = OTHER; note = bicyclic nucleic acid (BNA)
  modified_base 2: mod_base = OTHER; note = 5-methyl
  modified_base 14: mod_base = OTHER; note = 5-methyl
  modified_base 19: mod_base = OTHER; note = 5-methyl
  source 1..20: mol_type = other DNA
  modified_base 11: mod_base = OTHER; note = Uracil
  modified_base 16: mod_base = OTHER; note = Uracil
  modified_base 17: mod_base = OTHER; note = Uracil
  modified_base 18: mod_base = OTHER; note = Uracil
tcaaggaagatggcatttct

SEQ ID NO: 16022 - DNA, 20 bp, synthetic construct
  misc_feature 1..20: note = Description of Artificial Sequence: Synthetic Antisense oligonucleotide
  misc_feature 1..20: note = Original Sequence: tcaaggaagauggcauuuct
  modified_base 1..2: mod_base = OTHER; note = bicyclic nucleic acid (BNA)
  modified_base 7: mod_base = OTHER; note = bicyclic nucleic acid (BNA)
  modified_base 15: mod_base = OTHER; note = bicyclic nucleic acid (BNA)
  modified_base 20: mod_base = OTHER; note = bicyclic nucleic acid (BNA)
  modified_base 2: mod_base = OTHER; note = 5-methyl
  modified_base 14: mod_base = OTHER; note = 5-methyl
  modified_base 19: mod_base = OTHER; note = 5-methyl
  source 1..20: mol_type = other DNA
  modified_base 11: mod_base = OTHER; note = Uracil
  modified_base 16: mod_base = OTHER; note = Uracil
  modified_base 17: mod_base = OTHER; note = Uracil
  modified_base 18: mod_base = OTHER; note = Uracil
tcaaggaagatggcatttct

SEQ ID NO: 16023 - DNA, 20 bp, synthetic construct
  misc_feature 1..20: note = Description of Artificial Sequence: Synthetic Antisense oligonucleotide
  misc_feature 1..20: note = Original Sequence: tcaaggaagatggcauuuct
  modified_base 1..2: mod_base = OTHER; note = bicyclic nucleic acid (BNA)
  modified_base 7: mod_base = OTHER; note = bicyclic nucleic acid (BNA)
  modified_base 11: mod_base = OTHER; note = bicyclic nucleic acid (BNA)
  modified_base 15: mod_base = OTHER; note = bicyclic nucleic acid (BNA)
  modified_base 20: mod_base = OTHER; note = bicyclic nucleic acid (BNA)
  modified_base 2: mod_base = OTHER; note = 5-methyl
  modified_base 14: mod_base = OTHER; note = 5-methyl
  modified_base 19: mod_base = OTHER; note = 5-methyl
  source 1..20: mol_type = other DNA
  modified_base 16: mod_base = OTHER; note = Uracil
  modified_base 17: mod_base = OTHER; note = Uracil
  modified_base 18: mod_base = OTHER; note = Uracil
tcaaggaagatggcatttct

SEQ ID NO: 16024 - DNA, 20 bp, synthetic construct
  misc_feature 1..20: note = Description of Artificial Sequence: Synthetic Antisense oligonucleotide
  misc_feature 1..20: note = Original Sequence: tcaaggaagauggcauuuct
  modified_base 1..2: mod_base = OTHER; note = bicyclic nucleic acid (BNA)
  modified_base 6: mod_base = OTHER; note = bicyclic nucleic acid (BNA)
  modified_base 10: mod_base = OTHER; note = bicyclic nucleic acid (BNA)
  modified_base 15: mod_base = OTHER; note = bicyclic nucleic acid (BNA)
  modified_base 20: mod_base = OTHER; note = bicyclic nucleic acid (BNA)
  modified_base 2: mod_base = OTHER; note = 5-methyl
  modified_base 14: mod_base = OTHER; note = 5-methyl
  modified_base 19: mod_base = OTHER; note = 5-methyl
  source 1..20: mol_type = other DNA
  modified_base 11: mod_base = OTHER; note = Uracil
  modified_base 16: mod_base = OTHER; note = Uracil
  modified_base 17: mod_base = OTHER; note = Uracil
  modified_base 18: mod_base = OTHER; note = Uracil
tcaaggaagatggcatttct

SEQ ID NO: 16025 - DNA, 20 bp, synthetic construct
  misc_feature 1..20: note = Description of Artificial Sequence: Synthetic Antisense oligonucleotide
  misc_feature 1..20: note = Original Sequence: tcaaggaagauggcauuuct
  modified_base 1: mod_base = OTHER; note = bicyclic nucleic acid (BNA)
  modified_base 9: mod_base = OTHER; note = bicyclic nucleic acid (BNA)
  modified_base 20: mod_base = OTHER; note = bicyclic nucleic acid (BNA)
  modified_base 2: mod_base = OTHER; note = 5-methyl
  modified_base 14: mod_base = OTHER; note = 5-methyl
  modified_base 19: mod_base = OTHER; note = 5-methyl
  source 1..20: mol_type = other DNA
  modified_base 11: mod_base = OTHER; note = Uracil
  modified_base 16: mod_base = OTHER; note = Uracil
  modified_base 17: mod_base = OTHER; note = Uracil
  modified_base 18: mod_base = OTHER; note = Uracil
tcaaggaagatggcatttct

SEQ ID NO: 16026 - DNA, 20 bp, synthetic construct
  misc_feature 1..20: note = Description of Artificial Sequence: Synthetic Antisense oligonucleotide
  misc_feature 1..20: note = Original Sequence: tcaaggaagauggcauuuct
  modified_base 1: mod_base = OTHER; note = bicyclic nucleic acid (BNA)
  modified_base 13: mod_base = OTHER; note = bicyclic nucleic acid (BNA)
  modified_base 20: mod_base = OTHER; note = bicyclic nucleic acid (BNA)
  modified_base 2: mod_base = OTHER; note = 5-methyl
  modified_base 14: mod_base = OTHER; note = 5-methyl
  modified_base 19: mod_base = OTHER; note = 5-methyl
  source 1..20: mol_type = other DNA
  modified_base 11: mod_base = OTHER; note = Uracil
  modified_base 16: mod_base = OTHER; note = Uracil
  modified_base 17: mod_base = OTHER; note = Uracil
  modified_base 18: mod_base = OTHER; note = Uracil
tcaaggaagatggcatttct

SEQ ID NO: 16027 - DNA, 20 bp, synthetic construct
  misc_feature 1..20: note = Description of Artificial Sequence: Synthetic Antisense oligonucleotide
  misc_feature 1..20: note = Original Sequence: tcaaggaagauggcauuuct
  modified_base 1: mod_base = OTHER; note = bicyclic nucleic acid (BNA)
  modified_base 9: mod_base = OTHER; note = bicyclic nucleic acid (BNA)
  modified_base 13: mod_base = OTHER; note = bicyclic nucleic acid (BNA)
  modified_base 20: mod_base = OTHER; note = bicyclic nucleic acid (BNA)
  modified_base 2: mod_base = OTHER; note = 5-methyl
  modified_base 14: mod_base = OTHER; note = 5-methyl
  modified_base 19: mod_base = OTHER; note = 5-methyl
  source 1..20: mol_type = other DNA
  modified_base 11: mod_base = OTHER; note = Uracil
  modified_base 16: mod_base = OTHER; note = Uracil
  modified_base 17: mod_base = OTHER; note = Uracil
  modified_base 18: mod_base = OTHER; note = Uracil
tcaaggaagatggcatttct

SEQ ID NO: 16028 - DNA, 20 bp, synthetic construct
  misc_feature 1..20: note = Description of Artificial Sequence: Synthetic Antisense oligonucleotide
  misc_feature 1..20: note = Original Sequence: tcaaggaagauggcauuuct
  modified_base 1: mod_base = OTHER; note = bicyclic nucleic acid (BNA)
  modified_base 6: mod_base = OTHER; note = bicyclic nucleic acid (BNA)
  modified_base 9: mod_base = OTHER; note = bicyclic nucleic acid (BNA)
  modified_base 13: mod_base = OTHER; note = bicyclic nucleic acid (BNA)
  modified_base 20: mod_base = OTHER; note = bicyclic nucleic acid (BNA)
  modified_base 2: mod_base = OTHER; note = 5-methyl
  modified_base 14: mod_base = OTHER; note = 5-methyl
  modified_base 19: mod_base = OTHER; note = 5-methyl
  source 1..20: mol_type = other DNA
  modified_base 11: mod_base = OTHER; note = Uracil
  modified_base 16: mod_base = OTHER; note = Uracil
  modified_base 17: mod_base = OTHER; note = Uracil
  modified_base 18: mod_base = OTHER; note = Uracil
tcaaggaagatggcatttct

SEQ ID NO: 16029 - DNA, 22 bp, synthetic construct
  misc_feature 1..22: note = Description of Artificial Sequence: Synthetic Antisense oligonucleotide
  misc_feature 1..22: note = Original Sequence: tcaaggaagauggcauuucuag
  modified_base 1: mod_base = OTHER; note = bicyclic nucleic acid (BNA)
  modified_base 2: mod_base = OTHER; note = 5-methyl
  modified_base 14: mod_base = OTHER; note = 5-methyl
  modified_base 19: mod_base = OTHER; note = 5-methyl
  source 1..22: mol_type = other DNA
  modified_base 11: mod_base = OTHER; note = Uracil
  modified_base 16: mod_base = OTHER; note = Uracil
  modified_base 17: mod_base = OTHER; note = Uracil
  modified_base 18: mod_base = OTHER; note = Uracil
  modified_base 20: mod_base = OTHER; note = Uracil
tcaaggaagatggcatttctag

SEQ ID NO: 16030 - DNA, 22 bp, synthetic construct
  misc_feature 1..22: note = Description of Artificial Sequence: Synthetic Antisense oligonucleotide
  misc_feature 1..22: note = Original Sequence: tcaaggaagauggcauuucuag
  modified_base 1..2: mod_base = OTHER; note = bicyclic nucleic acid (BNA)
  modified_base 2: mod_base = OTHER; note = 5-methyl
  modified_base 14: mod_base = OTHER; note = 5-methyl
  modified_base 19: mod_base = OTHER; note = 5-methyl
  source 1..22: mol_type = other DNA
  modified_base 11: mod_base = OTHER; note = Uracil
  modified_base 16: mod_base = OTHER; note = Uracil
  modified_base 17: mod_base = OTHER; note = Uracil
  modified_base 18: mod_base = OTHER; note = Uracil
  modified_base 20: mod_base = OTHER; note = Uracil
tcaaggaagatggcatttctag

SEQ ID NO: 16031 - DNA, 22 bp, synthetic construct
  misc_feature 1..22: note = Description of Artificial Sequence: Synthetic Antisense oligonucleotide
  misc_feature 1..22: note = Original Sequence: tcaaggaagauggcauuucuag
  modified_base 1: mod_base = OTHER; note = bicyclic nucleic acid (BNA)
  modified_base 22: mod_base = OTHER; note = bicyclic nucleic acid (BNA)
  modified_base 2: mod_base = OTHER; note = 5-methyl
  modified_base 14: mod_base = OTHER; note = 5-methyl
  modified_base 19: mod_base = OTHER; note = 5-methyl
  source 1..22: mol_type = other DNA
  modified_base 11: mod_base = OTHER; note = Uracil
  modified_base 16: mod_base = OTHER; note = Uracil
  modified_base 17: mod_base = OTHER; note = Uracil
  modified_base 18: mod_base = OTHER; note = Uracil
  modified_base 20: mod_base = OTHER; note = Uracil
tcaaggaagatggcatttctag

SEQ ID NO: 16032 - DNA, 22 bp, synthetic construct
  misc_feature 1..22: note = Description of Artificial Sequence: Synthetic Antisense oligonucleotide
  misc_feature 1..22: note = Original Sequence: tcaaggaagauggcauuucuag
  modified_base 1..2: mod_base = OTHER; note = bicyclic nucleic acid (BNA)
  modified_base 22: mod_base = OTHER; note = bicyclic nucleic acid (BNA)
  modified_base 2: mod_base = OTHER; note = 5-methyl
  modified_base 14: mod_base = OTHER; note = 5-methyl
  modified_base 19: mod_base = OTHER; note = 5-methyl
  source 1..22: mol_type = other DNA
  modified_base 11: mod_base = OTHER; note = Uracil
  modified_base 16: mod_base = OTHER; note = Uracil
  modified_base 17: mod_base = OTHER; note = Uracil
  modified_base 18: mod_base = OTHER; note = Uracil
  modified_base 20: mod_base = OTHER; note = Uracil
tcaaggaagatggcatttctag

SEQ ID NO: 16033 - DNA, 22 bp, synthetic construct
  misc_feature 1..22: note = Description of Artificial Sequence: Synthetic Antisense oligonucleotide
  misc_feature 1..22: note = Original Sequence: tcaaggaagauggcauuucuag
  modified_base 1..2: mod_base = OTHER; note = bicyclic nucleic acid (BNA)
  modified_base 10: mod_base = OTHER; note = bicyclic nucleic acid (BNA)
  modified_base 22: mod_base = OTHER; note = bicyclic nucleic acid (BNA)
  modified_base 2: mod_base = OTHER; note = 5-methyl
  modified_base 14: mod_base = OTHER; note = 5-methyl
  modified_base 19: mod_base = OTHER; note = 5-methyl
  source 1..22: mol_type = other DNA
  modified_base 11: mod_base = OTHER; note = Uracil
  modified_base 16: mod_base = OTHER; note = Uracil
  modified_base 17: mod_base = OTHER; note = Uracil
  modified_base 18: mod_base = OTHER; note = Uracil
  modified_base 20: mod_base = OTHER; note = Uracil
tcaaggaagatggcatttctag

SEQ ID NO: 16034 - DNA, 22 bp, synthetic construct
  misc_feature 1..22: note = Description of Artificial Sequence: Synthetic Antisense oligonucleotide
  misc_feature 1..22: note = Original Sequence: tcaaggaagauggcauuucuag
  modified_base 1..2: mod_base = OTHER; note = bicyclic nucleic acid (BNA)
  modified_base 10: mod_base = OTHER; note = bicyclic nucleic acid (BNA)
  modified_base 15: mod_base = OTHER; note = bicyclic nucleic acid (BNA)
  modified_base 22: mod_base = OTHER; note = bicyclic nucleic acid (BNA)
  modified_base 2: mod_base = OTHER; note = 5-methyl
  modified_base 14: mod_base = OTHER; note = 5-methyl
  modified_base 19: mod_base = OTHER; note = 5-methyl
  source 1..22: mol_type = other DNA
  modified_base 11: mod_base = OTHER; note = Uracil
  modified_base 16: mod_base = OTHER; note = Uracil
  modified_base 17: mod_base = OTHER; note = Uracil
  modified_base 18: mod_base = OTHER; note = Uracil
  modified_base 20: mod_base = OTHER; note = Uracil
tcaaggaagatggcatttctag

SEQ ID NO: 16035 - DNA, 22 bp, synthetic construct
  misc_feature 1..22: note = Description of Artificial Sequence: Synthetic Antisense oligonucleotide
  misc_feature 1..22: note = Original Sequence: tcaaggaagauggcauuucuag
  modified_base 1..2: mod_base = OTHER; note = bicyclic nucleic acid (BNA)
  modified_base 13: mod_base = OTHER; note = bicyclic nucleic acid (BNA)
  modified_base 22: mod_base = OTHER; note = bicyclic nucleic acid (BNA)
  modified_base 2: mod_base = OTHER; note = 5-methyl
  modified_base 14: mod_base = OTHER; note = 5-methyl
  modified_base 19: mod_base = OTHER; note = 5-methyl
  source 1..22: mol_type = other DNA
  modified_base 11: mod_base = OTHER; note = Uracil
  modified_base 16: mod_base = OTHER; note = Uracil
  modified_base 17: mod_base = OTHER; note = Uracil
  modified_base 18: mod_base = OTHER; note = Uracil
  modified_base 20: mod_base = OTHER; note = Uracil
tcaaggaagatggcatttctag

SEQ ID NO: 16036 - DNA, 22 bp, synthetic construct
  misc_feature 1..22: note = Description of Artificial Sequence: Synthetic Antisense oligonucleotide
  misc_feature 1..22: note = Original Sequence: tcaaggaagauggcauuucuag
  modified_base 1..2: mod_base = OTHER; note = bicyclic nucleic acid (BNA)
  modified_base 9: mod_base = OTHER; note = bicyclic nucleic acid (BNA)
  modified_base 22: mod_base = OTHER; note = bicyclic nucleic acid (BNA)
  modified_base 2: mod_base = OTHER; note = 5-methyl
  modified_base 14: mod_base = OTHER; note = 5-methyl
  modified_base 19: mod_base = OTHER; note = 5-methyl
  source 1..22: mol_type = other DNA
  modified_base 11: mod_base = OTHER; note = Uracil
  modified_base 16: mod_base = OTHER; note = Uracil
  modified_base 17: mod_base = OTHER; note = Uracil
  modified_base 18: mod_base = OTHER; note = Uracil
  modified_base 20: mod_base = OTHER; note = Uracil
tcaaggaagatggcatttctag

SEQ ID NO: 16037 - DNA, 22 bp, synthetic construct
  misc_feature 1..22: note = Description of Artificial Sequence: Synthetic Antisense oligonucleotide
  misc_feature 1..22: note = Original Sequence: tcaaggaagauggcauuucuag
  modified_base 1..2: mod_base = OTHER; note = bicyclic nucleic acid (BNA)
  modified_base 9: mod_base = OTHER; note = bicyclic nucleic acid (BNA)
  modified_base 13: mod_base = OTHER; note = bicyclic nucleic acid (BNA)
  modified_base 22: mod_base = OTHER; note = bicyclic nucleic acid (BNA)
  modified_base 2: mod_base = OTHER; note = 5-methyl
  modified_base 14: mod_base = OTHER; note = 5-methyl
  modified_base 19: mod_base = OTHER; note = 5-methyl
  source 1..22: mol_type = other DNA
  modified_base 11: mod_base = OTHER; note = Uracil
  modified_base 16: mod_base = OTHER; note = Uracil
  modified_base 17: mod_base = OTHER; note = Uracil
  modified_base 18: mod_base = OTHER; note = Uracil
  modified_base 20: mod_base = OTHER; note = Uracil
tcaaggaagatggcatttctag

SEQ ID NO: 16038 - DNA, 22 bp, synthetic construct
  misc_feature 1..22: note = Description of Artificial Sequence: Synthetic Antisense oligonucleotide
  misc_feature 1..22: note = Original Sequence: tcaaggaagauggcauuucuag
  modified_base 1..2: mod_base = OTHER; note = bicyclic nucleic acid (BNA)
  modified_base 5: mod_base = OTHER; note = bicyclic nucleic acid (BNA)
  modified_base 9: mod_base = OTHER; note = bicyclic nucleic acid (BNA)
  modified_base 13: mod_base = OTHER; note = bicyclic nucleic acid (BNA)
  modified_base 22: mod_base = OTHER; note = bicyclic nucleic acid (BNA)
  modified_base 2: mod_base = OTHER; note = 5-methyl
  modified_base 14: mod_base = OTHER; note = 5-methyl
  modified_base 19: mod_base = OTHER; note = 5-methyl
  source 1..22: mol_type = other DNA
  modified_base 11: mod_base = OTHER; note = Uracil
  modified_base 16: mod_base = OTHER; note = Uracil
  modified_base 17: mod_base = OTHER; note = Uracil
  modified_base 18: mod_base = OTHER; note = Uracil
  modified_base 20: mod_base = OTHER; note = Uracil
tcaaggaagatggcatttctag

SEQ ID NO: 16039 - DNA, 16 bp, synthetic construct
  misc_feature 1..16: note = Description of Artificial Sequence: Synthetic Antisense oligonucleotide
  misc_feature 1..16: note = Original Sequence: tcaaggaagauggcat
  modified_base 1: mod_base = OTHER; note = bicyclic nucleic acid (BNA)
  modified_base 16: mod_base = OTHER; note = bicyclic nucleic acid (BNA)
  modified_base 2: mod_base = OTHER; note = 5-methyl
  modified_base 14: mod_base = OTHER; note = 5-methyl
  source 1..16: mol_type = other DNA
  modified_base 11: mod_base = OTHER; note = Uracil
tcaaggaagatggcat

SEQ ID NO: 16040 - DNA, 16 bp, synthetic construct
  misc_feature 1..16: note = Description of Artificial Sequence: Synthetic Antisense oligonucleotide
  misc_feature 1..16: note = Original Sequence: tcaaggaagauggcat
  modified_base 1: mod_base = OTHER; note = bicyclic nucleic acid (BNA)
  modified_base 13: mod_base = OTHER; note = bicyclic nucleic acid (BNA)
  modified_base 16: mod_base = OTHER; note = bicyclic nucleic acid (BNA)
  modified_base 2: mod_base = OTHER; note = 5-methyl
  modified_base 14: mod_base = OTHER; note = 5-methyl
  source 1..16: mol_type = other DNA
  modified_base 11: mod_base = OTHER; note = Uracil
tcaaggaagatggcat

SEQ ID NO: 16041 - RNA, 16 nt, synthetic construct
  misc_feature 1..16: note = Description of Artificial Sequence: Synthetic Antisense oligonucleotide
  modified_base 2: mod_base = OTHER; note = 5-methyl
  modified_base 14: mod_base = OTHER; note = 5-methyl
  modified_base 13: mod_base = OTHER; note = bicyclic nucleic acid (BNA)
  source 1..16: mol_type = other RNA
tcaaggaagatggcat

SEQ ID NO: 16042 - DNA, 15 bp, synthetic construct
  misc_feature 1..15: note = Description of Artificial Sequence: Synthetic Antisense oligonucleotide
  misc_feature 1..15: note = Original Sequence: gaagauggcauuuct
  modified_base 1: mod_base = OTHER; note = bicyclic nucleic acid (BNA)
  modified_base 8: mod_base = OTHER; note = bicyclic nucleic acid (BNA)
  modified_base 15: mod_base = OTHER; note = bicyclic nucleic acid (BNA)
  modified_base 9: mod_base = OTHER; note = 5-methyl
  modified_base 14: mod_base = OTHER; note = 5-methyl
  source 1..15: mol_type = other DNA
  modified_base 6: mod_base = OTHER; note = Uracil
  modified_base 11: mod_base = OTHER; note = Uracil
  modified_base 12: mod_base = OTHER; note = Uracil
  modified_base 13: mod_base = OTHER; note = Uracil
gaagatggcatttct

SEQ ID NO: 16043 - DNA, 18 bp, synthetic construct
  misc_feature 1..18: note = Description of Artificial Sequence: Synthetic Antisense oligonucleotide
  modified_base 1: mod_base = OTHER; note = bicyclic nucleic acid (BNA)
  modified_base 18: mod_base = OTHER; note = bicyclic nucleic acid (BNA)
  source 1..18: mol_type = other DNA
ggtaagttctgtccaagc

SEQ ID NO: 16044 - DNA, 18 bp, synthetic construct
  misc_feature 1..18: note = Description of Artificial Sequence: Synthetic Antisense oligonucleotide
  modified_base 1..2: mod_base = OTHER; note = bicyclic nucleic acid (BNA)
  modified_base 10: mod_base = OTHER; note = bicyclic nucleic acid (BNA)
  modified_base 18: mod_base = OTHER; note = bicyclic nucleic acid (BNA)
  source 1..18: mol_type = other DNA
ggtaagttctgtccaagc

SEQ ID NO: 16045 - DNA, 18 bp, synthetic construct
  misc_feature 1..18: note = Description of Artificial Sequence: Synthetic Antisense oligonucleotide
  modified_base 1..2: mod_base = OTHER; note = bicyclic nucleic acid (BNA)
  modified_base 17..18: mod_base = OTHER; note = bicyclic nucleic acid (BNA)
  source 1..18: mol_type = other DNA
ggtaagttctgtccaagc

SEQ ID NO: 16046 - DNA, 18 bp, synthetic construct
  misc_feature 1..18: note = Description of Artificial Sequence: Synthetic Antisense oligonucleotide
  modified_base 1..2: mod_base = OTHER; note = bicyclic nucleic acid (BNA)
  modified_base 6: mod_base = OTHER; note = bicyclic nucleic acid (BNA)
  modified_base 18: mod_base = OTHER; note = bicyclic nucleic acid (BNA)
  source 1..18: mol_type = other DNA
ggtaagttctgtccaagc

SEQ ID NO: 16047 - DNA, 18 bp, synthetic construct
  misc_feature 1..18: note = Description of Artificial Sequence: Synthetic Antisense oligonucleotide
  modified_base 1..2: mod_base = OTHER; note = bicyclic nucleic acid (BNA)
  modified_base 11: mod_base = OTHER; note = bicyclic nucleic acid (BNA)
  modified_base 18: mod_base = OTHER; note = bicyclic nucleic acid (BNA)
  source 1..18: mol_type = other DNA
ggtaagttctgtccaagc

SEQ ID NO: 16048 - DNA, 18 bp, synthetic construct
  misc_feature 1..18: note = Description of Artificial Sequence: Synthetic Antisense oligonucleotide
  modified_base 1..2: mod_base = OTHER; note = bicyclic nucleic acid (BNA)
  modified_base 6: mod_base = OTHER; note = bicyclic nucleic acid (BNA)
  modified_base 11: mod_base = OTHER; note = bicyclic nucleic acid (BNA)
  modified_base 18: mod_base = OTHER; note = bicyclic nucleic acid (BNA)
  source 1..18: mol_type = other DNA
ggtaagttctgtccaagc

SEQ ID NO: 16049 - DNA, 18 bp, synthetic construct
  misc_feature 1..18: note = Description of Artificial Sequence: Synthetic Antisense oligonucleotide
  modified_base 1..2: mod_base = OTHER; note = bicyclic nucleic acid (BNA)
  modified_base 6: mod_base = OTHER; note = bicyclic nucleic acid (BNA)
  modified_base 11: mod_base = OTHER; note = bicyclic nucleic acid (BNA)
  modified_base 17..18: mod_base = OTHER; note = bicyclic nucleic acid (BNA)
  source 1..18: mol_type = other DNA
ggtaagttctgtccaagc

SEQ ID NO: 16050 - DNA, 18 bp, synthetic construct
  misc_feature 1..18: note = Description of Artificial Sequence: Synthetic Antisense oligonucleotide
  modified_base 1..2: mod_base = OTHER; note = bicyclic nucleic acid (BNA)
  modified_base 18: mod_base = OTHER; note = bicyclic nucleic acid (BNA)
  source 1..18: mol_type = other DNA
ggtaagttctgtccaagc

SEQ ID NO: 16051 - DNA, 18 bp, synthetic construct
  misc_feature 1..18: note = Description of Artificial Sequence: Synthetic Antisense oligonucleotide
  modified_base 1: mod_base = OTHER; note = bicyclic nucleic acid (BNA)
  modified_base 6: mod_base = OTHER; note = bicyclic nucleic acid (BNA)
  modified_base 18: mod_base = OTHER; note = bicyclic nucleic acid (BNA)
  source 1..18: mol_type = other DNA
ggtaagttctgtccaagc

SEQ ID NO: 16052 - DNA, 18 bp, synthetic construct
  misc_feature 1..18: note = Description of Artificial Sequence: Synthetic Antisense oligonucleotide
  modified_base 1: mod_base = OTHER; note = bicyclic nucleic acid (BNA)
  modified_base 11: mod_base = OTHER; note = bicyclic nucleic acid (BNA)
  modified_base 18: mod_base = OTHER; note = bicyclic nucleic acid (BNA)
  source 1..18: mol_type = other DNA
ggtaagttctgtccaagc

SEQ ID NO: 16053 - DNA, 18 bp, synthetic construct
  misc_feature 1..18: note = Description of Artificial Sequence: Synthetic Antisense oligonucleotide
  modified_base 1: mod_base = OTHER; note = bicyclic nucleic acid (BNA)
  modified_base 9: mod_base = OTHER; note = bicyclic nucleic acid (BNA)
  modified_base 18: mod_base = OTHER; note = bicyclic nucleic acid (BNA)
  source 1..18: mol_type = other DNA
ggtaagttctgtccaagc

SEQ ID NO: 16054 - DNA, 18 bp, synthetic construct
  misc_feature 1..18: note = Description of Artificial Sequence: Synthetic Antisense oligonucleotide
  modified_base 1: mod_base = OTHER; note = bicyclic nucleic acid (BNA)
  modified_base 18: mod_base = OTHER; note = bicyclic nucleic acid (BNA)
  source 1..18: mol_type = other DNA
ggtaagttctgtccaagc

SEQ ID NO: 16055 - DNA, 18 bp, synthetic construct
  misc_feature 1..18: note = Description of Artificial Sequence: Synthetic Antisense oligonucleotide
  modified_base 1: mod_base = OTHER; note = bicyclic nucleic acid (BNA)
  modified_base 5: mod_base = OTHER; note = bicyclic nucleic acid (BNA)
  modified_base 18: mod_base = OTHER; note = bicyclic nucleic acid (BNA)
  source 1..18: mol_type = other DNA
gtaagttctgtccaagcc

SEQ ID NO: 16056 - DNA, 18 bp, synthetic construct
  misc_feature 1..18: note = Description of Artificial Sequence: Synthetic Antisense oligonucleotide
  modified_base 1: mod_base = OTHER; note = bicyclic nucleic acid (BNA)
  modified_base 18: mod_base = OTHER; note = bicyclic nucleic acid (BNA)
  source 1..18: mol_type = other DNA
gtaagttctgtccaagcc

SEQ ID NO: 16057 - DNA, 18 bp, synthetic construct
  misc_feature 1..18: note = Description of Artificial Sequence: Synthetic Antisense oligonucleotide
  modified_base 1: mod_base = OTHER; note = bicyclic nucleic acid (BNA)
  modified_base 18: mod_base = OTHER; note = bicyclic nucleic acid (BNA)
  source 1..18: mol_type = other DNA
agtcggtaagttctgtcc

SEQ ID NO: 16058 - DNA, 18 bp, synthetic construct
  misc_feature 1..18: note = Description of Artificial Sequence: Synthetic Antisense oligonucleotide
  modified_base 1: mod_base = OTHER; note = bicyclic nucleic acid (BNA)
  modified_base 5..6: mod_base = OTHER; note = bicyclic nucleic acid (BNA)
  modified_base 10: mod_base = OTHER; note = bicyclic nucleic acid (BNA)
  modified_base 18: mod_base = OTHER; note = bicyclic nucleic acid (BNA)
  source 1..18: mol_type = other DNA
agtcggtaagttctgtcc

SEQ ID NO: 16059 - DNA, 18 bp, synthetic construct
  misc_feature 1..18: note = Description of Artificial Sequence: Synthetic Antisense oligonucleotide
  modified_base 1: mod_base = OTHER; note = bicyclic nucleic acid (BNA)
  modified_base 6: mod_base = OTHER; note = bicyclic nucleic acid (BNA)
  modified_base 10: mod_base = OTHER; note = bicyclic nucleic acid (BNA)
  modified_base 13: mod_base = OTHER; note = bicyclic nucleic acid (BNA)
  modified_base 18: mod_base = OTHER; note = bicyclic nucleic acid (BNA)
  source 1..18: mol_type = other DNA
agtcggtaagttctgtcc

SEQ ID NO: 16060 - DNA, 18 bp, synthetic construct
  misc_feature 1..18: note = Description of Artificial Sequence: Synthetic Antisense oligonucleotide
  modified_base 1: mod_base = OTHER; note = bicyclic nucleic acid (BNA)
  modified_base 5: mod_base = OTHER; note = bicyclic nucleic acid (BNA)
  modified_base 10: mod_base = OTHER; note = bicyclic nucleic acid (BNA)
  modified_base 13: mod_base = OTHER; note = bicyclic nucleic acid (BNA)
  modified_base 18: mod_base = OTHER; note = bicyclic nucleic acid (BNA)
  source 1..18: mol_type = other DNA
agtcggtaagttctgtcc

SEQ ID NO: 16061 - DNA, 18 bp, synthetic construct
  misc_feature 1..18: note = Description of Artificial Sequence: Synthetic Antisense oligonucleotide
  modified_base 1: mod_base = OTHER; note = bicyclic nucleic acid (BNA)
  modified_base 10: mod_base = OTHER; note = bicyclic nucleic acid (BNA)
  modified_base 13: mod_base = OTHER; note = bicyclic nucleic acid (BNA)
  modified_base 18: mod_base = OTHER; note = bicyclic nucleic acid (BNA)
  source 1..18: mol_type = other DNA
agtcggtaagttctgtcc

SEQ ID NO: 16062 - DNA, 18 bp, synthetic construct
  misc_feature 1..18: note = Description of Artificial Sequence: Synthetic Antisense oligonucleotide
  modified_base 1: mod_base = OTHER; note = bicyclic nucleic acid (BNA)
  modified_base 5: mod_base = OTHER; note = bicyclic nucleic acid (BNA)
  modified_base 10: mod_base = OTHER; note = bicyclic nucleic acid (BNA)
  modified_base 18: mod_base = OTHER; note = bicyclic nucleic acid (BNA)
  source 1..18: mol_type = other DNA
agtcggtaagttctgtcc

SEQ ID NO: 16063 - DNA, 18 bp, synthetic construct
  misc_feature 1..18: note = Description of Artificial Sequence: Synthetic Antisense oligonucleotide
  modified_base 1: mod_base = OTHER; note = bicyclic nucleic acid (BNA)
  modified_base 5: mod_base = OTHER; note = bicyclic nucleic acid (BNA)
  modified_base 13: mod_base = OTHER; note = bicyclic nucleic acid (BNA)
  modified_base 18: mod_base = OTHER; note = bicyclic nucleic acid (BNA)
  source 1..18: mol_type = other DNA
agtcggtaagttctgtcc

SEQ ID NO: 16064 - DNA, 18 bp, synthetic construct
  misc_feature 1..18: note = Description of Artificial Sequence: Synthetic Antisense oligonucleotide
  modified_base 1: mod_base = OTHER; note = bicyclic nucleic acid (BNA)
  modified_base 5..6: mod_base = OTHER; note = bicyclic nucleic acid (BNA)
  modified_base 13: mod_base = OTHER; note = bicyclic nucleic acid (BNA)
  modified_base 18: mod_base = OTHER; note = bicyclic nucleic acid (BNA)
  source 1..18: mol_type = other DNA
agtcggtaagttctgtcc

SEQ ID NO: 16065 - DNA, 18 bp, synthetic construct
  misc_feature 1..18: note = Description of Artificial Sequence: Synthetic Antisense oligonucleotide
  modified_base 1: mod_base = OTHER; note = bicyclic nucleic acid (BNA)
  modified_base 5: mod_base = OTHER; note = bicyclic nucleic acid (BNA)
  modified_base 13: mod_base = OTHER; note = bicyclic nucleic acid (BNA)
  modified_base 18: mod_base = OTHER; note = bicyclic nucleic acid (BNA)
  source 1..18: mol_type = other DNA
agtcggtaagttctgtcc

SEQ ID NO: 16066 - DNA, 18 bp, synthetic construct
  misc_feature 1..18: note = Description of Artificial Sequence: Synthetic Antisense oligonucleotide
  modified_base 1: mod_base = OTHER; note = bicyclic nucleic acid (BNA)
  modified_base 6: mod_base = OTHER; note = bicyclic nucleic acid (BNA)
  modified_base 13: mod_base = OTHER; note = bicyclic nucleic acid (BNA)
  modified_base 18: mod_base = OTHER; note = bicyclic nucleic acid (BNA)
  source 1..18: mol_type = other DNA
agtcggtaagttctgtcc

SEQ ID NO: 16067 - DNA, 18 bp, synthetic construct
  misc_feature 1..18: note = Description of Artificial Sequence: Synthetic Antisense oligonucleotide
  modified_base 1: mod_base = OTHER; note = bicyclic nucleic acid (BNA)
  modified_base 18: mod_base = OTHER; note = bicyclic nucleic acid (BNA)
  source 1..18: mol_type = other DNA
ctgtccaagcccggttga

SEQ ID NO: 16068 - DNA, 18 bp, synthetic construct
  misc_feature 1..18: note = Description of Artificial Sequence: Synthetic Antisense oligonucleotide
  modified_base 1: mod_base = OTHER; note = bicyclic nucleic acid (BNA)
  modified_base 9: mod_base = OTHER; note = bicyclic nucleic acid (BNA)
  modified_base 14: mod_base = OTHER; note = bicyclic nucleic acid (BNA)
  modified_base 18: mod_base = OTHER; note = bicyclic nucleic acid (BNA)
  source 1..18: mol_type = other DNA
ctgtccaagcccggttga

SEQ ID NO: 16069 - DNA, 18 bp, synthetic construct
  misc_feature 1..18: note = Description of Artificial Sequence: Synthetic Antisense oligonucleotide
  modified_base 1: mod_base = OTHER; note = bicyclic nucleic acid (BNA)
  modified_base 9: mod_base = OTHER; note = bicyclic nucleic acid (BNA)
  modified_base 18: mod_base = OTHER; note = bicyclic nucleic acid (BNA)
  source 1..18: mol_type = other DNA
ctgtccaagcccggttga

SEQ ID NO: 16070 - DNA, 18 bp, synthetic construct
  misc_feature 1..18: note = Description of Artificial Sequence: Synthetic Antisense oligonucleotide
  modified_base 1: mod_base = OTHER; note = bicyclic nucleic acid (BNA)
  modified_base 14: mod_base = OTHER; note = bicyclic nucleic acid (BNA)
  modified_base 18: mod_base = OTHER; note = bicyclic nucleic acid (BNA)
  source 1..18: mol_type = other DNA
ctgtccaagcccggttga

SEQ ID NO: 16071 - DNA, 18 bp, synthetic construct
  misc_feature 1..18: note = Description of Artificial Sequence: Synthetic Antisense oligonucleotide
  modified_base 1: mod_base = OTHER; note = bicyclic nucleic acid (BNA)
  modified_base 13: mod_base = OTHER; note = bicyclic nucleic acid (BNA)
  modified_base 18: mod_base = OTHER; note = bicyclic nucleic acid (BNA)
  source 1..18: mol_type = other DNA
ctgtccaagcccggttga

SEQ ID NO: 16072 - DNA, 18 bp, synthetic construct
  misc_feature 1..18: note = Description of Artificial Sequence: Synthetic Antisense oligonucleotide
  modified_base 1: mod_base = OTHER; note = bicyclic nucleic acid (BNA)
  modified_base 13..14: mod_base = OTHER; note = bicyclic nucleic acid (BNA)
  modified_base 18: mod_base = OTHER; note = bicyclic nucleic acid (BNA)
  source 1..18: mol_type = other DNA
ctgtccaagcccggttga

SEQ ID NO: 16073 - DNA, 18 bp, synthetic construct
  misc_feature 1..18: note = Description of Artificial Sequence: Synthetic Antisense oligonucleotide
  modified_base 1: mod_base = OTHER; note = bicyclic nucleic acid (BNA)
  modified_base 6: mod_base = OTHER; note = bicyclic nucleic acid (BNA)
  modified_base 13: mod_base = OTHER; note = bicyclic nucleic acid (BNA)
  modified_base 18: mod_base = OTHER; note = bicyclic nucleic acid (BNA)
  source 1..18: mol_type = other DNA
ctgtccaagcccggttga

SEQ ID NO: 16074 - DNA, 18 bp, synthetic construct
  misc_feature 1..18: note = Description of Artificial Sequence: Synthetic Antisense oligonucleotide
  modified_base 1: mod_base = OTHER; note = bicyclic nucleic acid (BNA)
  modified_base 5..6: mod_base = OTHER; note = bicyclic nucleic acid (BNA)
  modified_base 13: mod_base = OTHER; note = bicyclic nucleic acid (BNA)
  modified_base 18: mod_base = OTHER; note = bicyclic nucleic acid (BNA)
  source 1..18: mol_type = other DNA
ctgtccaagcccggttga

SEQ ID NO: 16075 - DNA, 18 bp, synthetic construct
  misc_feature 1..18: note = Description of Artificial Sequence: Synthetic Antisense oligonucleotide
  modified_base 1: mod_base = OTHER; note = bicyclic nucleic acid (BNA)
  modified_base 5: mod_base = OTHER; note = bicyclic nucleic acid (BNA)
  modified_base 13: mod_base = OTHER; note = bicyclic nucleic acid (BNA)
  modified_base 18: mod_base = OTHER; note = bicyclic nucleic acid (BNA)
  source 1..18: mol_type = other DNA
ctgtccaagcccggttga

SEQ ID NO: 16076 - DNA, 18 bp, synthetic construct
  misc_feature 1..18: note = Description of Artificial Sequence: Synthetic Antisense oligonucleotide
  modified_base 1: mod_base = OTHER; note = bicyclic nucleic acid (BNA)
  modified_base 9: mod_base = OTHER; note = bicyclic nucleic acid (BNA)
  modified_base 13: mod_base = OTHER; note = bicyclic nucleic acid (BNA)
  modified_base 18: mod_base = OTHER; note = bicyclic nucleic acid (BNA)
  source 1..18: mol_type = other DNA
ctgtccaagcccggttga

SEQ ID NO: 16077 - DNA, 18 bp, synthetic construct
  misc_feature 1..18: note = Description of Artificial Sequence: Synthetic Antisense oligonucleotide
  modified_base 1: mod_base = OTHER; note = bicyclic nucleic acid (BNA)
  modified_base 9: mod_base = OTHER; note = bicyclic nucleic acid (BNA)
  modified_base 14: mod_base = OTHER; note = bicyclic nucleic acid (BNA)
  modified_base 18: mod_base = OTHER; note = bicyclic nucleic acid (BNA)
  source 1..18: mol_type = other DNA
ctgtccaagcccggttga

SEQ ID NO: 16078 - DNA, 15 bp, synthetic construct
  misc_feature 1..15: note = Description of Artificial Sequence: Synthetic Antisense oligonucleotide
  modified_base 1: mod_base = OTHER; note = bicyclic nucleic acid (BNA)
  modified_base 15: mod_base = OTHER; note = bicyclic nucleic acid (BNA)
  source 1..15: mol_type = other DNA
taagttctgtccaag

SEQ ID NO: 16079 - DNA, 15 bp, synthetic construct
  misc_feature 1..15: note = Description of Artificial Sequence: Synthetic Antisense oligonucleotide
  modified_base 1: mod_base = OTHER; note = bicyclic nucleic acid (BNA)
  modified_base 4: mod_base = OTHER; note = bicyclic nucleic acid (BNA)
  modified_base 15: mod_base = OTHER; note = bicyclic nucleic acid (BNA)
  source 1..15: mol_type = other DNA
taagttctgtccaag

SEQ ID NO: 16080 - DNA, 20 bp, synthetic construct
  misc_feature 1..20: note = Description of Artificial Sequence: Synthetic Antisense oligonucleotide
  modified_base 1: mod_base = OTHER; note = bicyclic nucleic acid (BNA)
  source 1..20: mol_type = other DNA
tcaaggaagatggcatttct

SEQ ID NO: 16081 - DNA, 20 bp, synthetic construct
  misc_feature 1..20: note = Description of Artificial Sequence: Synthetic Antisense oligonucleotide
  modified_base 5: mod_base = OTHER; note = bicyclic nucleic acid (BNA)
  source 1..20: mol_type = other DNA
tcaaggaagatggcatttct

SEQ ID NO: 16082 - DNA, 20 bp, synthetic construct
  misc_feature 1..20: note = Description of Artificial Sequence: Synthetic Antisense oligonucleotide
  modified_base 1: mod_base = OTHER; note = bicyclic nucleic acid (BNA)
  modified_base 20: mod_base = OTHER; note = bicyclic nucleic acid (BNA)
  source 1..20: mol_type = other DNA
tcaaggaagatggcatttct

SEQ ID NO: 16083 - DNA, 20 bp, synthetic construct
  misc_feature 1..20: note = Description of Artificial Sequence: Synthetic Antisense oligonucleotide
  modified_base 1..2: mod_base = OTHER; note = bicyclic nucleic acid (BNA)
  source 1..20: mol_type = other DNA
tcaaggaagatggcatttct

SEQ ID NO: 16084 - DNA, 20 bp, synthetic construct
  misc_feature 1..20: note = Description of Artificial Sequence: Synthetic Antisense oligonucleotide
  modified_base 1..2: mod_base = OTHER; note = bicyclic nucleic acid (BNA)
  modified_base 13: mod_base = OTHER; note = bicyclic nucleic acid (BNA)
  source 1..20: mol_type = other DNA
tcaaggaagatggcatttct

SEQ ID NO: 16085 - DNA, 20 bp, synthetic construct
  misc_feature 1..20: note = Description of Artificial Sequence: Synthetic Antisense oligonucleotide
  modified_base 1..2: mod_base = OTHER; note = bicyclic nucleic acid (BNA)
  modified_base 20: mod_base = OTHER; note = bicyclic nucleic acid (BNA)
  source 1..20: mol_type = other DNA
tcaaggaagatggcatttct

SEQ ID NO: 16086 - DNA, 20 bp, synthetic construct
  misc_feature 1..20: note = Description of Artificial Sequence: Synthetic Antisense oligonucleotide
  modified_base 1..2: mod_base = OTHER; note = bicyclic nucleic acid (BNA)
  modified_base 10: mod_base = OTHER; note = bicyclic nucleic acid (BNA)
  modified_base 20: mod_base = OTHER; note = bicyclic nucleic acid (BNA)
  source 1..20: mol_type = other DNA
tcaaggaagatggcatttct

SEQ ID NO: 16087 - DNA, 20 bp, synthetic construct
  misc_feature 1..20: note = Description of Artificial Sequence: Synthetic Antisense oligonucleotide
  modified_base 1: mod_base = OTHER; note = bicyclic nucleic acid (BNA)
  modified_base 7: mod_base = OTHER; note = bicyclic nucleic acid (BNA)
  modified_base 15: mod_base = OTHER; note = bicyclic nucleic acid (BNA)
  modified_base 20: mod_base = OTHER; note = bicyclic nucleic acid (BNA)
  source 1..20: mol_type = other DNA
tcaaggaagatggcatttct

SEQ ID NO: 16088 - DNA, 20 bp, synthetic construct
  misc_feature 1..20: note = Description of Artificial Sequence: Synthetic Antisense oligonucleotide
  modified_base 1..2: mod_base = OTHER; note = bicyclic nucleic acid (BNA)
  modified_base 7: mod_base = OTHER; note = bicyclic nucleic acid (BNA)
  modified_base 15: mod_base = OTHER; note = bicyclic nucleic acid (BNA)
  modified_base 20: mod_base = OTHER; note = bicyclic nucleic acid (BNA)
  source 1..20: mol_type = other DNA
tcaaggaagatggcatttct

SEQ ID NO: 16089 - DNA, 20 bp, synthetic construct
  misc_feature 1..20: note = Description of Artificial Sequence: Synthetic Antisense oligonucleotide
  modified_base 1..2: mod_base = OTHER; note = bicyclic nucleic acid (BNA)
  modified_base 7: mod_base = OTHER; note = bicyclic nucleic acid (BNA)
  modified_base 11: mod_base = OTHER; note = bicyclic nucleic acid (BNA)
  modified_base 15: mod_base = OTHER; note = bicyclic nucleic acid (BNA)
  modified_base 20: mod_base = OTHER; note = bicyclic nucleic acid (BNA)
  source 1..20: mol_type = other DNA
tcaaggaagatggcatttct

SEQ ID NO: 16090 - DNA, 20 bp, synthetic construct
  misc_feature 1..20: note = Description of Artificial Sequence: Synthetic Antisense oligonucleotide
  modified_base 1..2: mod_base = OTHER; note = bicyclic nucleic acid (BNA)
  modified_base 6: mod_base = OTHER; note = bicyclic nucleic acid (BNA)
  modified_base 10: mod_base = OTHER; note = bicyclic nucleic acid (BNA)
  modified_base 15: mod_base = OTHER; note = bicyclic nucleic acid (BNA)
  modified_base 20: mod_base = OTHER; note = bicyclic nucleic acid (BNA)
  source 1..20: mol_type = other DNA
tcaaggaagatggcatttct

SEQ ID NO: 16091 - DNA, 20 bp, synthetic construct
  misc_feature 1..20: note = Description of Artificial Sequence: Synthetic Antisense oligonucleotide
  modified_base 1: mod_base = OTHER; note = bicyclic nucleic acid (BNA)
  modified_base 9: mod_base = OTHER; note = bicyclic nucleic acid (BNA)
  modified_base 20: mod_base = OTHER; note = bicyclic nucleic acid (BNA)
  source 1..20: mol_type = other DNA
tcaaggaagatggcatttct

SEQ ID NO: 16092 - DNA, 20 bp, synthetic construct
  misc_feature 1..20: note = Description of Artificial Sequence: Synthetic Antisense oligonucleotide
  modified_base 1: mod_base = OTHER; note = bicyclic nucleic acid (BNA)
  modified_base 13: mod_base = OTHER; note = bicyclic nucleic acid (BNA)
  modified_base 20: mod_base = OTHER; note = bicyclic nucleic acid (BNA)
  source 1..20: mol_type = other DNA
tcaaggaagatggcatttct

SEQ ID NO: 16093 - DNA, 20 bp, synthetic construct
  misc_feature 1..20: note = Description of Artificial Sequence: Synthetic Antisense oligonucleotide
  modified_base 1: mod_base = OTHER; note = bicyclic nucleic acid (BNA)
  modified_base 9: mod_base = OTHER; note = bicyclic nucleic acid (BNA)
  modified_base 13: mod_base = OTHER; note = bicyclic nucleic acid (BNA)
  modified_base 20: mod_base = OTHER; note = bicyclic nucleic acid (BNA)
  source 1..20: mol_type = other DNA
tcaaggaagatggcatttct

SEQ ID NO: 16094 - DNA, 20 bp, synthetic construct
  misc_feature 1..20: note = Description of Artificial Sequence: Synthetic Antisense oligonucleotide
  modified_base 1: mod_base = OTHER; note = bicyclic nucleic acid (BNA)
  modified_base 6: mod_base = OTHER; note = bicyclic nucleic acid (BNA)
  modified_base 9: mod_base = OTHER; note = bicyclic nucleic acid (BNA)
  modified_base 13: mod_base = OTHER; note = bicyclic nucleic acid (BNA)
  modified_base 20: mod_base = OTHER; note = bicyclic nucleic acid (BNA)
  source 1..20: mol_type = other DNA
tcaaggaagatggcatttct

SEQ ID NO: 16095 - DNA, 22 bp, synthetic construct
  misc_feature 1..22: note = Description of Artificial Sequence: Synthetic Antisense oligonucleotide
  modified_base 1: mod_base = OTHER; note = bicyclic nucleic acid (BNA)
  source 1..22: mol_type = other DNA
tcaaggaagatggcatttctag

SEQ ID NO: 16096 - DNA, 22 bp, synthetic construct
  misc_feature 1..22: note = Description of Artificial Sequence: Synthetic Antisense oligonucleotide
  modified_base 1..2: mod_base = OTHER; note = bicyclic nucleic acid (BNA)
  source 1..22: mol_type = other DNA
tcaaggaagatggcatttctag

SEQ ID NO: 16097 - DNA, 22 bp, synthetic construct
  misc_feature 1..22: note = Description of Artificial Sequence: Synthetic Antisense oligonucleotide
  modified_base 1: mod_base = OTHER; note = bicyclic nucleic acid (BNA)
  modified_base 22: mod_base = OTHER; note = bicyclic nucleic acid (BNA)
  source 1..22: mol_type = other DNA
tcaaggaagatggcatttctag

SEQ ID NO: 16098 - DNA, 22 bp, synthetic construct
  misc_feature 1..22: note = Description of Artificial Sequence: Synthetic Antisense oligonucleotide
  modified_base 1..2: mod_base = OTHER; note = bicyclic nucleic acid (BNA)
  modified_base 22: mod_base = OTHER; note = bicyclic nucleic acid (BNA)
  source 1..22: mol_type = other DNA
tcaaggaagatggcatttctag

SEQ ID NO: 16099 - DNA, 22 bp, synthetic construct
  misc_feature 1..22: note = Description of Artificial Sequence: Synthetic Antisense oligonucleotide
  modified_base 1..2: mod_base = OTHER; note = bicyclic nucleic acid (BNA)
  modified_base 10: mod_base = OTHER; note = bicyclic nucleic acid (BNA)
  modified_base 22: mod_base = OTHER; note = bicyclic nucleic acid (BNA)
  source 1..22: mol_type = other DNA
tcaaggaagatggcatttctag

SEQ ID NO: 16100 - DNA, 22 bp, synthetic construct
  misc_feature 1..22: note = Description of Artificial Sequence: Synthetic Antisense oligonucleotide
  modified_base 1..2: mod_base = OTHER; note = bicyclic nucleic acid (BNA)
  modified_base 10: mod_base = OTHER; note = bicyclic nucleic acid (BNA)
  modified_base 15: mod_base = OTHER; note = bicyclic nucleic acid (BNA)
  modified_base 22: mod_base = OTHER; note = bicyclic nucleic acid (BNA)
  source 1..22: mol_type = other DNA
tcaaggaagatggcatttctag

SEQ ID NO: 16101 - DNA, 22 bp, synthetic construct
  misc_feature 1..22: note = Description of Artificial Sequence: Synthetic Antisense oligonucleotide
  modified_base 1..2: mod_base = OTHER; note = bicyclic nucleic acid (BNA)
  modified_base 13: mod_base = OTHER; note = bicyclic nucleic acid (BNA)
  modified_base 22: mod_base = OTHER; note = bicyclic nucleic acid (BNA)
  source 1..22: mol_type = other DNA
tcaaggaagatggcatttctag

SEQ ID NO: 16102 - DNA, 22 bp, synthetic construct
  misc_feature 1..22: note = Description of Artificial Sequence: Synthetic Antisense oligonucleotide
  modified_base 1..2: mod_base = OTHER; note = bicyclic nucleic acid (BNA)
  modified_base 9: mod_base = OTHER; note = bicyclic nucleic acid (BNA)
  modified_base 22: mod_base = OTHER; note = bicyclic nucleic acid (BNA)
  source 1..22: mol_type = other DNA
tcaaggaagatggcatttctag

SEQ ID NO: 16103 - DNA, 22 bp, synthetic construct
  misc_feature 1..22: note = Description of Artificial Sequence: Synthetic Antisense oligonucleotide
  modified_base 1..2: mod_base = OTHER; note = bicyclic nucleic acid (BNA)
  modified_base 9: mod_base = OTHER; note = bicyclic nucleic acid (BNA)
  modified_base 13: mod_base = OTHER; note = bicyclic nucleic acid (BNA)
  modified_base 22: mod_base = OTHER; note = bicyclic nucleic acid (BNA)
  source 1..22: mol_type = other DNA
tcaaggaagatggcatttctag

SEQ ID NO: 16104 - DNA, 22 bp, synthetic construct
  misc_feature 1..22: note = Description of Artificial Sequence: Synthetic Antisense oligonucleotide
  modified_base 1..2: mod_base = OTHER; note = bicyclic nucleic acid (BNA)
  modified_base 5: mod_base = OTHER; note = bicyclic nucleic acid (BNA)
  modified_base 9: mod_base = OTHER; note = bicyclic nucleic acid (BNA)
  modified_base 13: mod_base = OTHER; note = bicyclic nucleic acid (BNA)
  modified_base 22: mod_base = OTHER; note = bicyclic nucleic acid (BNA)
  source 1..22: mol_type = other DNA
tcaaggaagatggcatttctag

SEQ ID NO: 16105 - DNA, 16 bp, synthetic construct
  misc_feature 1..16: note = Description of Artificial Sequence: Synthetic Antisense oligonucleotide
  modified_base 1: mod_base = OTHER; note = bicyclic nucleic acid (BNA)
  modified_base 16: mod_base = OTHER; note = bicyclic nucleic acid (BNA)
  source 1..16: mol_type = other DNA
tcaaggaagatggcat

SEQ ID NO: 16106 - DNA, 16 bp, synthetic construct
  misc_feature 1..16: note = Description of Artificial Sequence: Synthetic Antisense oligonucleotide
  modified_base 1: mod_base = OTHER; note = bicyclic nucleic acid (BNA)
  modified_base 13: mod_base = OTHER; note = bicyclic nucleic acid (BNA)
  modified_base 16: mod_base = OTHER; note = bicyclic nucleic acid (BNA)
  source 1..16: mol_type = other DNA
tcaaggaagatggcat

SEQ ID NO: 16107 - DNA, 16 bp, synthetic construct
  misc_feature 1..16: note = Description of Artificial Sequence: Synthetic Antisense oligonucleotide
  modified_base 13: mod_base = OTHER; note = bicyclic nucleic acid (BNA)
  source 1..16: mol_type = other DNA
tcaaggaagatggcat

SEQ ID NO: 16108 - DNA, 15 bp, synthetic construct
  misc_feature 1..15: note = Description of Artificial Sequence: Synthetic Antisense oligonucleotide
  modified_base 1: mod_base = OTHER; note = bicyclic nucleic acid (BNA)
  modified_base 8: mod_base = OTHER; note = bicyclic nucleic acid (BNA)
  modified_base 15: mod_base = OTHER; note = bicyclic nucleic acid (BNA)
  source 1..15: mol_type = other DNA
gaagatggcatttct

SEQ ID NO: 16109 - DNA, 18 bp, synthetic construct
  misc_feature 1..18: note = Description of Artificial Sequence: Synthetic Antisense oligonucleotide
  modified_base 1: mod_base = OTHER; note = bicyclic nucleic acid (BNA)
  modified_base 18: mod_base = OTHER; note = bicyclic nucleic acid (BNA)
  modified_base 9: mod_base = OTHER; note = 5-methyl
  modified_base 13..14: mod_base = OTHER; note = 5-methyl
  modified_base 18: mod_base = OTHER; note = 5-methyl
  source 1..18: mol_type = other DNA
ggtaagttctgtccaagc

SEQ ID NO: 16110 - DNA, 18 bp, synthetic construct
  misc_feature 1..18: note = Description of Artificial Sequence: Synthetic Antisense oligonucleotide
  modified_base 1..2: mod_base = OTHER; note = bicyclic nucleic acid (BNA)
  modified_base 10: mod_base = OTHER; note = bicyclic nucleic acid (BNA)
  modified_base 18: mod_base = OTHER; note = bicyclic nucleic acid (BNA)
  modified_base 9: mod_base = OTHER; note = 5-methyl
  modified_base 13..14: mod_base = OTHER; note = 5-methyl
  modified_base 18: mod_base = OTHER; note = 5-methyl
  source 1..18: mol_type = other DNA
ggtaagttctgtccaagc

SEQ ID NO: 16111 - DNA, 18 bp, synthetic construct
  misc_feature 1..18: note = Description of Artificial Sequence: Synthetic Antisense oligonucleotide
  modified_base 1..2: mod_base = OTHER; note = bicyclic nucleic acid (BNA)
  modified_base 17..18: mod_base = OTHER; note = bicyclic nucleic acid (BNA)
  modified_base 9: mod_base = OTHER; note = 5-methyl
  modified_base 13..14: mod_base = OTHER; note = 5-methyl
  modified_base 18: mod_base = OTHER; note = 5-methyl
  source 1..18: mol_type = other DNA
ggtaagttctgtccaagc

SEQ ID NO: 16112 - DNA, 18 bp, synthetic construct
  misc_feature 1..18: note = Description of Artificial Sequence: Synthetic Antisense oligonucleotide
  modified_base 1..2: mod_base = OTHER; note = bicyclic nucleic acid (BNA)
  modified_base 6: mod_base = OTHER; note = bicyclic nucleic acid (BNA)
  modified_base 18: mod_base = OTHER; note = bicyclic nucleic acid (BNA)
  modified_base 9: mod_base = OTHER; note = 5-methyl
  modified_base 13..14: mod_base = OTHER; note = 5-methyl
  modified_base 18: mod_base = OTHER; note = 5-methyl
  source 1..18: mol_type = other DNA
ggtaagttctgtccaagc

SEQ ID NO: 16113 - DNA, 18 bp, synthetic construct
  misc_feature 1..18: note = Description of Artificial Sequence: Synthetic Antisense oligonucleotide
  modified_base 1..2: mod_base = OTHER; note = bicyclic nucleic acid (BNA)
  modified_base 11: mod_base = OTHER; note = bicyclic nucleic acid (BNA)
  modified_base 18: mod_base = OTHER; note = bicyclic nucleic acid (BNA)
  modified_base 9: mod_base = OTHER; note = 5-methyl
  modified_base 13..14: mod_base = OTHER; note = 5-methyl
  modified_base 18: mod_base = OTHER; note = 5-methyl
  source 1..18: mol_type = other DNA
ggtaagttctgtccaagc

SEQ ID NO: 16114 - DNA, 18 bp, synthetic construct
  misc_feature 1..18: note = Description of Artificial Sequence: Synthetic Antisense oligonucleotide
  modified_base 1..2: mod_base = OTHER; note = bicyclic nucleic acid (BNA)
  modified_base 6: mod_base = OTHER; note = bicyclic nucleic acid (BNA)
  modified_base 11: mod_base = OTHER; note = bicyclic nucleic acid (BNA)
  modified_base 18: mod_base = OTHER; note = bicyclic nucleic acid (BNA)
  modified_base 9: mod_base = OTHER; note = 5-methyl
  modified_base 13..14: mod_base = OTHER; note = 5-methyl
  modified_base 18: mod_base = OTHER; note = 5-methyl
  source 1..18: mol_type = other DNA
ggtaagttctgtccaagc

SEQ ID NO: 16115 - DNA, 18 bp, synthetic construct
  misc_feature 1..18: note = Description of Artificial Sequence: Synthetic Antisense oligonucleotide
  modified_base 1..2: mod_base = OTHER; note = bicyclic nucleic acid (BNA)
  modified_base 6: mod_base = OTHER; note = bicyclic nucleic acid (BNA)
  modified_base 11: mod_base = OTHER; note = bicyclic nucleic acid (BNA)
  modified_base 17..18: mod_base = OTHER; note = bicyclic nucleic acid (BNA)
  modified_base 9: mod_base = OTHER; note = 5-methyl
  modified_base 13..14: mod_base = OTHER; note = 5-methyl
  modified_base 18: mod_base = OTHER; note = 5-methyl
  source 1..18: mol_type = other DNA
ggtaagttctgtccaagc

SEQ ID NO: 16116 - DNA, 18 bp, synthetic construct
  misc_feature 1..18: note = Description of Artificial Sequence: Synthetic Antisense oligonucleotide
  modified_base 1..2: mod_base = OTHER; note = bicyclic nucleic acid (BNA)
  modified_base 18: mod_base = OTHER; note = bicyclic nucleic acid (BNA)
  modified_base 9: mod_base = OTHER; note = 5-methyl
  modified_base 13..14: mod_base = OTHER; note = 5-methyl
  modified_base 18: mod_base = OTHER; note = 5-methyl
  source 1..18: mol_type = other DNA
ggtaagttctgtccaagc

SEQ ID NO: 16117 - DNA, 18 bp, synthetic construct
  misc_feature 1..18: note = Description of Artificial Sequence: Synthetic Antisense oligonucleotide
  modified_base 1: mod_base = OTHER; note = bicyclic nucleic acid (BNA)
  modified_base 6: mod_base = OTHER; note = bicyclic nucleic acid (BNA)
  modified_base 18: mod_base = OTHER; note = bicyclic nucleic acid (BNA)
  modified_base 9: mod_base = OTHER; note = 5-methyl
  modified_base 13..14: mod_base = OTHER; note = 5-methyl
  modified_base 18: mod_base = OTHER; note = 5-methyl
  source 1..18: mol_type = other DNA
ggtaagttctgtccaagc

SEQ ID NO: 16118 - DNA, 18 bp, synthetic construct
  misc_feature 1..18: note = Description of Artificial Sequence: Synthetic Antisense oligonucleotide
  modified_base 1: mod_base = OTHER; note = bicyclic nucleic acid (BNA)
  modified_base 11: mod_base = OTHER; note = bicyclic nucleic acid (BNA)
  modified_base 18: mod_base = OTHER; note = bicyclic nucleic acid (BNA)
  modified_base 9: mod_base = OTHER; note = 5-methyl
  modified_base 13..14: mod_base = OTHER; note = 5-methyl
  modified_base 18: mod_base = OTHER; note = 5-methyl
  source 1..18: mol_type = other DNA
ggtaagttctgtccaagc

SEQ ID NO: 16119 - DNA, 18 bp, synthetic construct
  misc_feature 1..18: note = Description of Artificial Sequence: Synthetic Antisense oligonucleotide
  modified_base 1: mod_base = OTHER; note = bicyclic nucleic acid (BNA)
  modified_base 9: mod_base = OTHER; note = bicyclic nucleic acid (BNA)
  modified_base 18: mod_base = OTHER; note = bicyclic nucleic acid (BNA)
  modified_base 9: mod_base = OTHER; note = 5-methyl
  modified_base 13..14: mod_base = OTHER; note = 5-methyl
  modified_base 18: mod_base = OTHER; note = 5-methyl
  source 1..18: mol_type = other DNA
ggtaagttctgtccaagc

SEQ ID NO: 16120 - DNA, 18 bp, synthetic construct
  misc_feature 1..18: note = Description of Artificial Sequence: Synthetic Antisense oligonucleotide
  modified_base 1: mod_base = OTHER; note = bicyclic nucleic acid (BNA)
  modified_base 18: mod_base = OTHER; note = bicyclic nucleic acid (BNA)
  modified_base 9: mod_base = OTHER; note = 5-methyl
  modified_base 13..14: mod_base = OTHER; note = 5-methyl
  modified_base 18: mod_base = OTHER; note = 5-methyl
  source 1..18: mol_type = other DNA
ggtaagttctgtccaagc

SEQ ID NO: 16121 - DNA, 18 bp, synthetic construct
  misc_feature 1..18: note = Description of Artificial Sequence: Synthetic Antisense oligonucleotide
  modified_base 1: mod_base = OTHER; note = bicyclic nucleic acid (BNA)
  modified_base 5: mod_base = OTHER; note = bicyclic nucleic acid (BNA)
  modified_base 18: mod_base = OTHER; note = bicyclic nucleic acid (BNA)
  modified_base 8: mod_base = OTHER; note = 5-methyl
  modified_base 12..13: mod_base = OTHER; note = 5-methyl
  modified_base 17..18: mod_base = OTHER; note = 5-methyl
  source 1..18: mol_type = other DNA
gtaagttctgtccaagcc

SEQ ID NO: 16122 - DNA, 18 bp, synthetic construct
  misc_feature 1..18: note = Description of Artificial Sequence: Synthetic Antisense oligonucleotide
  modified_base 1: mod_base = OTHER; note = bicyclic nucleic acid (BNA)
  modified_base 18: mod_base = OTHER; note = bicyclic nucleic acid (BNA)
  modified_base 8: mod_base = OTHER; note = 5-methyl
  modified_base 12..13: mod_base = OTHER; note = 5-methyl
  modified_base 17..18: mod_base = OTHER; note = 5-methyl
  source 1..18: mol_type = other DNA
gtaagttctgtccaagcc

SEQ ID NO: 16123 - DNA, 18 bp, synthetic construct
  misc_feature 1..18: note = Description of Artificial Sequence: Synthetic Antisense oligonucleotide
  modified_base 1: mod_base = OTHER; note = bicyclic nucleic acid (BNA)
  modified_base 18: mod_base = OTHER; note = bicyclic nucleic acid (BNA)
  modified_base 4: mod_base = OTHER; note = 5-methyl
  modified_base 13: mod_base = OTHER; note = 5-methyl
  modified_base 17..18: mod_base = OTHER; note = 5-methyl
  source 1..18: mol_type = other DNA
agtcggtaagttctgtcc

SEQ ID NO: 16124 - DNA, 18 bp, synthetic construct
  misc_feature 1..18: note = Description of Artificial Sequence: Synthetic Antisense oligonucleotide
  modified_base 1: mod_base = OTHER; note = bicyclic nucleic acid (BNA)
  modified_base 5..6: mod_base = OTHER; note = bicyclic nucleic acid (BNA)
  modified_base 10: mod_base = OTHER; note = bicyclic nucleic acid (BNA)
  modified_base 18: mod_base = OTHER; note = bicyclic nucleic acid (BNA)
  modified_base 4: mod_base = OTHER; note = 5-methyl
  modified_base 13: mod_base = OTHER; note = 5-methyl
  modified_base 17..18: mod_base = OTHER; note = 5-methyl
  source 1..18: mol_type = other DNA
agtcggtaagttctgtcc

SEQ ID NO: 16125 - DNA, 18 bp, synthetic construct
  misc_feature 1..18: note = Description of Artificial Sequence: Synthetic Antisense oligonucleotide
  modified_base 1: mod_base = OTHER; note = bicyclic nucleic acid (BNA)
  modified_base 6: mod_base = OTHER; note = bicyclic nucleic acid (BNA)
  modified_base 10: mod_base = OTHER; note = bicyclic nucleic acid (BNA)
  modified_base 13: mod_base = OTHER; note = bicyclic nucleic acid (BNA)
  modified_base 18: mod_base = OTHER; note = bicyclic nucleic acid (BNA)
  modified_base 4: mod_base = OTHER; note = 5-methyl
  modified_base 13: mod_base = OTHER; note = 5-methyl
  modified_base 17..18: mod_base = OTHER; note = 5-methyl
  source 1..18: mol_type = other DNA
agtcggtaagttctgtcc

SEQ ID NO: 16126 - DNA, 18 bp, synthetic construct
  misc_feature 1..18: note = Description of Artificial Sequence: Synthetic Antisense oligonucleotide
  modified_base 1: mod_base = OTHER; note = bicyclic nucleic acid (BNA)
  modified_base 5: mod_base = OTHER; note = bicyclic nucleic acid (BNA)
  modified_base 10: mod_base = OTHER; note = bicyclic nucleic acid (BNA)
  modified_base 13: mod_base = OTHER; note = bicyclic nucleic acid (BNA)
  modified_base 18: mod_base = OTHER; note = bicyclic nucleic acid (BNA)
  modified_base 4: mod_base = OTHER; note = 5-methyl
  modified_base 13: mod_base = OTHER; note = 5-methyl
  modified_base 17..18: mod_base = OTHER; note = 5-methyl
  source 1..18: mol_type = other DNA
agtcggtaagttctgtcc

SEQ ID NO: 16127 - DNA, 18 bp, synthetic construct
  misc_feature 1..18: note = Description of Artificial Sequence: Synthetic Antisense oligonucleotide
  modified_base 1: mod_base = OTHER; note = bicyclic nucleic acid (BNA)
  modified_base 10: mod_base = OTHER; note = bicyclic nucleic acid (BNA)
  modified_base 13: mod_base = OTHER; note = bicyclic nucleic acid (BNA)
  modified_base 18: mod_base = OTHER; note = bicyclic nucleic acid (BNA)
  modified_base 4: mod_base = OTHER; note = 5-methyl
  modified_base 13: mod_base = OTHER; note = 5-methyl
  modified_base 17..18: mod_base = OTHER; note = 5-methyl
  source 1..18: mol_type = other DNA
agtcggtaagttctgtcc

SEQ ID NO: 16128 - DNA, 18 bp, synthetic construct
  misc_feature 1..18: note = Description of Artificial Sequence: Synthetic Antisense oligonucleotide
  modified_base 1: mod_base = OTHER; note = bicyclic nucleic acid (BNA)
  modified_base 5: mod_base = OTHER; note = bicyclic nucleic acid (BNA)
  modified_base 10: mod_base = OTHER; note = bicyclic nucleic acid (BNA)
  modified_base 18: mod_base = OTHER; note = bicyclic nucleic acid (BNA)
  modified_base 4: mod_base = OTHER; note = 5-methyl
  modified_base 13: mod_base = OTHER; note = 5-methyl
  modified_base 17..18: mod_base = OTHER; note = 5-methyl
  source 1..18: mol_type = other DNA
agtcggtaagttctgtcc

SEQ ID NO: 16129 - DNA, 18 bp, synthetic construct
  misc_feature 1..18: note = Description of Artificial Sequence: Synthetic Antisense oligonucleotide
  modified_base 1: mod_base = OTHER; note = bicyclic nucleic acid (BNA)
  modified_base 5: mod_base = OTHER; note = bicyclic nucleic acid (BNA)
  modified_base 13: mod_base = OTHER; note = bicyclic nucleic acid (BNA)
  modified_base 18: mod_base = OTHER; note = bicyclic nucleic acid (BNA)
  modified_base 4: mod_base = OTHER; note = 5-methyl
  modified_base 13: mod_base = OTHER; note = 5-methyl
  modified_base 17..18: mod_base = OTHER; note = 5-methyl
  source 1..18: mol_type = other DNA
agtcggtaagttctgtcc

SEQ ID NO: 16130 - DNA, 18 bp, synthetic construct
  misc_feature 1..18: note = Description of Artificial Sequence: Synthetic Antisense oligonucleotide
  modified_base 1: mod_base = OTHER; note = bicyclic nucleic acid (BNA)
  modified_base 5..6: mod_base = OTHER; note = bicyclic nucleic acid (BNA)
  modified_base 13: mod_base = OTHER; note = bicyclic nucleic acid (BNA)
  modified_base 18: mod_base = OTHER; note = bicyclic nucleic acid (BNA)
  modified_base 4: mod_base = OTHER; note = 5-methyl
  modified_base 13: mod_base = OTHER; note = 5-methyl
  modified_base 17..18: mod_base = OTHER; note = 5-methyl
  source 1..18: mol_type = other DNA
agtcggtaagttctgtcc

SEQ ID NO: 16131 - DNA, 18 bp, synthetic construct
  misc_feature 1..18: note = Description of Artificial Sequence: Synthetic Antisense oligonucleotide
  modified_base 1: mod_base = OTHER; note = bicyclic nucleic acid (BNA)
  modified_base 5: mod_base = OTHER; note = bicyclic nucleic acid (BNA)
  modified_base 13: mod_base = OTHER; note = bicyclic nucleic acid (BNA)
  modified_base 18: mod_base = OTHER; note = bicyclic nucleic acid (BNA)
  modified_base 4: mod_base = OTHER; note = 5-methyl
  modified_base 13: mod_base = OTHER; note = 5-methyl
  modified_base 17..18: mod_base = OTHER; note = 5-methyl
  source 1..18: mol_type = other DNA
agtcggtaagttctgtcc

SEQ ID NO: 16132 - DNA, 18 bp, synthetic construct
  misc_feature 1..18: note = Description of Artificial Sequence: Synthetic Antisense oligonucleotide
  modified_base 1: mod_base = OTHER; note = bicyclic nucleic acid (BNA)
  modified_base 6: mod_base = OTHER; note = bicyclic nucleic acid (BNA)
  modified_base 13: mod_base = OTHER; note = bicyclic nucleic acid (BNA)
  modified_base 18: mod_base = OTHER; note = bicyclic nucleic acid (BNA)
  modified_base 4: mod_base = OTHER; note = 5-methyl
  modified_base 13: mod_base = OTHER; note = 5-methyl
  modified_base 17..18: mod_base = OTHER; note = 5-methyl
  source 1..18: mol_type = other DNA
agtcggtaagttctgtcc

SEQ ID NO: 16133 - DNA, 18 bp, synthetic construct
  misc_feature 1..18: note = Description of Artificial Sequence: Synthetic Antisense oligonucleotide
  modified_base 1: mod_base = OTHER; note = 5-methyl
  modified_base 5..6: mod_base = OTHER; note = 5-methyl
  modified_base 10..12: mod_base = OTHER; note = 5-methyl
  modified_base 1: mod_base = OTHER; note = bicyclic nucleic acid (BNA)
  modified_base 18: mod_base = OTHER; note = bicyclic nucleic acid (BNA)
  source 1..18: mol_type = other DNA
ctgtccaagcccggttga

SEQ ID NO: 16134 - DNA, 18 bp, synthetic construct
  misc_feature 1..18: note = Description of Artificial Sequence: Synthetic Antisense oligonucleotide
  modified_base 1: mod_base = OTHER; note = 5-methyl
  modified_base 5..6: mod_base = OTHER; note = 5-methyl
  modified_base 10..12: mod_base = OTHER; note = 5-methyl
  modified_base 1: mod_base = OTHER; note = bicyclic nucleic acid (BNA)
  modified_base 9: mod_base = OTHER; note = bicyclic nucleic acid (BNA)
  modified_base 14: mod_base = OTHER; note = bicyclic nucleic acid (BNA)
  modified_base 18: mod_base = OTHER; note = bicyclic nucleic acid (BNA)
  source 1..18: mol_type = other DNA
ctgtccaagcccggttga

SEQ ID NO: 16135 - DNA, 18 bp, synthetic construct
  misc_feature 1..18: note = Description of Artificial Sequence: Synthetic Antisense oligonucleotide
  modified_base 1: mod_base = OTHER; note = 5-methyl
  modified_base 5..6: mod_base = OTHER; note = 5-methyl
  modified_base 10..12: mod_base = OTHER; note = 5-methyl
  modified_base 1: mod_base = OTHER; note = bicyclic nucleic acid (BNA)
  modified_base 9: mod_base = OTHER; note = bicyclic nucleic acid (BNA)
  modified_base 18: mod_base = OTHER; note = bicyclic nucleic acid (BNA)
  source 1..18: mol_type = other DNA
ctgtccaagcccggttga

SEQ ID NO: 16136 - DNA, 18 bp, synthetic construct
  misc_feature 1..18: note = Description of Artificial Sequence: Synthetic Antisense oligonucleotide
  modified_base 1: mod_base = OTHER; note = 5-methyl
  modified_base 5..6: mod_base = OTHER; note = 5-methyl
  modified_base 10..12: mod_base = OTHER; note = 5-methyl
  modified_base 1: mod_base = OTHER; note = bicyclic nucleic acid (BNA)
  modified_base 14: mod_base = OTHER; note = bicyclic nucleic acid (BNA)
  modified_base 18: mod_base = OTHER; note = bicyclic nucleic acid (BNA)
  source 1..18: mol_type = other DNA
ctgtccaagcccggttga

SEQ ID NO: 16137 - DNA, 18 bp, synthetic construct
  misc_feature 1..18: note = Description of Artificial Sequence: Synthetic Antisense oligonucleotide
  modified_base 1: mod_base = OTHER; note = 5-methyl
  modified_base 5..6: mod_base = OTHER; note = 5-methyl
  modified_base 10..12: mod_base = OTHER; note = 5-methyl
  modified_base 1: mod_base = OTHER; note = bicyclic nucleic acid (BNA)
  modified_base 13: mod_base = OTHER; note = bicyclic nucleic acid (BNA)
  modified_base 18: mod_base = OTHER; note = bicyclic nucleic acid (BNA)
  source 1..18: mol_type = other DNA
ctgtccaagcccggttga

SEQ ID NO: 16138 - DNA, 18 bp, synthetic construct
  misc_feature 1..18: note = Description of Artificial Sequence: Synthetic Antisense oligonucleotide
  modified_base 1: mod_base = OTHER; note = 5-methyl
  modified_base 5..6: mod_base = OTHER; note = 5-methyl
  modified_base 10..12: mod_base = OTHER; note = 5-methyl
  modified_base 1: mod_base = OTHER; note = bicyclic nucleic acid (BNA)
  modified_base 13..14: mod_base = OTHER; note = bicyclic nucleic acid (BNA)
  modified_base 18: mod_base = OTHER; note = bicyclic nucleic acid (BNA)
  source 1..18: mol_type = other DNA
ctgtccaagcccggttga

SEQ ID NO: 16139 - DNA, 18 bp, synthetic construct
  misc_feature 1..18: note = Description of Artificial Sequence: Synthetic Antisense oligonucleotide
  modified_base 1: mod_base = OTHER; note = 5-methyl
  modified_base 5..6: mod_base = OTHER; note = 5-methyl
  modified_base 10..12: mod_base = OTHER; note = 5-methyl
  modified_base 1: mod_base = OTHER; note = bicyclic nucleic acid (BNA)
  modified_base 6: mod_base = OTHER; note = bicyclic nucleic acid (BNA)
  modified_base 13: mod_base = OTHER; note = bicyclic nucleic acid (BNA)
  modified_base 18: mod_base = OTHER; note = bicyclic nucleic acid (BNA)
  source 1..18: mol_type = other DNA
ctgtccaagcccggttga

SEQ ID NO: 16140 - DNA, 18 bp, synthetic construct
  misc_feature 1..18: note = Description of Artificial Sequence: Synthetic Antisense oligonucleotide
  modified_base 1: mod_base = OTHER; note = 5-methyl
  modified_base 5..6: mod_base = OTHER; note = 5-methyl
  modified_base 10..12: mod_base = OTHER; note = 5-methyl
  modified_base 1: mod_base = OTHER; note = bicyclic nucleic acid (BNA)
  modified_base 5..6: mod_base = OTHER; note = bicyclic nucleic acid (BNA)
  modified_base 13: mod_base = OTHER; note = bicyclic nucleic acid (BNA)
  modified_base 18: mod_base = OTHER; note = bicyclic nucleic acid (BNA)
  source 1..18: mol_type = other DNA
ctgtccaagcccggttga

SEQ ID NO: 16141 - DNA, 18 bp, synthetic construct
  misc_feature 1..18: note = Description of Artificial Sequence: Synthetic Antisense oligonucleotide
  modified_base 1: mod_base = OTHER; note = 5-methyl
  modified_base 5..6: mod_base = OTHER; note = 5-methyl
  modified_base 10..12: mod_base = OTHER; note = 5-methyl
  modified_base 1: mod_base = OTHER; note = bicyclic nucleic acid (BNA)
  modified_base 5: mod_base = OTHER; note = bicyclic nucleic acid (BNA)
  modified_base 13: mod_base = OTHER; note = bicyclic nucleic acid (BNA)
  modified_base 18: mod_base = OTHER; note = bicyclic nucleic acid (BNA)
  source 1..18: mol_type = other DNA
ctgtccaagcccggttga

SEQ ID NO: 16142 - DNA, 18 bp, synthetic construct
  misc_feature 1..18: note = Description of Artificial Sequence: Synthetic Antisense oligonucleotide
  modified_base 1: mod_base = OTHER; note = 5-methyl
  modified_base 5..6: mod_base = OTHER; note = 5-methyl
  modified_base 10..12: mod_base = OTHER; note = 5-methyl
  modified_base 1: mod_base = OTHER; note = bicyclic nucleic acid (BNA)
  modified_base 9: mod_base = OTHER; note = bicyclic nucleic acid (BNA)
  modified_base 13: mod_base = OTHER; note = bicyclic nucleic acid (BNA)
  modified_base 18: mod_base = OTHER; note = bicyclic nucleic acid (BNA)
  source 1..18: mol_type = other DNA
ctgtccaagcccggttga

SEQ ID NO: 16143 - DNA, 18 bp, synthetic construct
  misc_feature 1..18: note = Description of Artificial Sequence: Synthetic Antisense oligonucleotide
  modified_base 1: mod_base = OTHER; note = 5-methyl
  modified_base 5..6: mod_base = OTHER; note = 5-methyl
  modified_base 10..12: mod_base = OTHER; note = 5-methyl
  modified_base 1: mod_base = OTHER; note = bicyclic nucleic acid (BNA)
  modified_base 9: mod_base = OTHER; note = bicyclic nucleic acid (BNA)
  modified_base 14: mod_base = OTHER; note = bicyclic nucleic acid (BNA)
  modified_base 18: mod_base = OTHER; note = bicyclic nucleic acid (BNA)
  source 1..18: mol_type = other DNA
ctgtccaagcccggttga

SEQ ID NO: 16144 - DNA, 15 bp, synthetic construct
  misc_feature 1..15: note = Description of Artificial Sequence: Synthetic Antisense oligonucleotide
  modified_base 1: mod_base = OTHER; note = bicyclic nucleic acid (BNA)
  modified_base 15: mod_base = OTHER; note = bicyclic nucleic acid (BNA)
  modified_base 7: mod_base = OTHER; note = 5-methyl
  modified_base 11..12: mod_base = OTHER; note = 5-methyl
  source 1..15: mol_type = other DNA
taagttctgtccaag

SEQ ID NO: 16145 - DNA, 15 bp, synthetic construct
  misc_feature 1..15: note = Description of Artificial Sequence: Synthetic Antisense oligonucleotide
  modified_base 1: mod_base = OTHER; note = bicyclic nucleic acid (BNA)
  modified_base 4: mod_base = OTHER; note = bicyclic nucleic acid (BNA)
  modified_base 15: mod_base = OTHER; note = bicyclic nucleic acid (BNA)
  modified_base 7: mod_base = OTHER; note = 5-methyl
  modified_base 11..12: mod_base = OTHER; note = 5-methyl
  source 1..15: mol_type = other DNA
taagttctgtccaag

SEQ ID NO: 16146 - DNA, 20 bp, synthetic construct
  misc_feature 1..20: note = Description of Artificial Sequence: Synthetic Antisense oligonucleotide
  modified_base 1: mod_base = OTHER; note = bicyclic nucleic acid (BNA)
  modified_base 2: mod_base = OTHER; note = 5-methyl
  modified_base 14: mod_base = OTHER; note = 5-methyl
  modified_base 19: mod_base = OTHER; note = 5-methyl
  source 1..20: mol_type = other DNA
tcaaggaagatggcatttct

SEQ ID NO: 16147 - DNA, 20 bp, synthetic construct
  misc_feature 1..20: note = Description of Artificial Sequence: Synthetic Antisense oligonucleotide
  modified_base 2: mod_base = OTHER; note = 5-methyl
  modified_base 14: mod_base = OTHER; note = 5-methyl
  modified_base 19: mod_base = OTHER; note = 5-methyl
  modified_base 5: mod_base = OTHER; note = bicyclic nucleic acid (BNA)
  source 1..20: mol_type = other DNA
tcaaggaagatggcatttct

SEQ ID NO: 16148 - DNA, 20 bp, synthetic construct
  misc_feature 1..20: note = Description of Artificial Sequence: Synthetic Antisense oligonucleotide
  modified_base 1: mod_base = OTHER; note = bicyclic nucleic acid (BNA)
  modified_base 20: mod_base = OTHER; note = bicyclic nucleic acid (BNA)
  modified_base 2: mod_base = OTHER; note = 5-methyl
  modified_base 14: mod_base = OTHER; note = 5-methyl
  modified_base 19: mod_base = OTHER; note = 5-methyl
  source 1..20: mol_type = other DNA
tcaaggaagatggcatttct

SEQ ID NO: 16149 - DNA, 20 bp, synthetic construct
  misc_feature 1..20: note = Description of Artificial Sequence: Synthetic Antisense oligonucleotide
  modified_base 1..2: mod_base = OTHER; note = bicyclic nucleic acid (BNA)
  modified_base 2: mod_base = OTHER; note = 5-methyl
  modified_base 14: mod_base = OTHER; note = 5-methyl
  modified_base 19: mod_base = OTHER; note = 5-methyl
  source 1..20: mol_type = other DNA
tcaaggaagatggcatttct

SEQ ID NO: 16150 - DNA, 20 bp, synthetic construct
  misc_feature 1..20: note = Description of Artificial Sequence: Synthetic Antisense oligonucleotide
  modified_base 1..2: mod_base = OTHER; note = bicyclic nucleic acid (BNA)
  modified_base 13: mod_base = OTHER; note = bicyclic nucleic acid (BNA)
  modified_base 2: mod_base = OTHER; note = 5-methyl
  modified_base 14: mod_base = OTHER; note = 5-methyl
  modified_base 19: mod_base = OTHER; note = 5-methyl
  source 1..20: mol_type = other DNA
tcaaggaagatggcatttct

SEQ ID NO: 16151 - DNA, 20 bp, synthetic construct
  misc_feature 1..20: note = Description of Artificial Sequence: Synthetic Antisense oligonucleotide
  modified_base 1..2: mod_base = OTHER; note = bicyclic nucleic acid (BNA)
  modified_base 20: mod_base = OTHER; note = bicyclic nucleic acid (BNA)
  modified_base 2: mod_base = OTHER; note = 5-methyl
  modified_base 14: mod_base = OTHER; note = 5-methyl
  modified_base 19: mod_base = OTHER; note = 5-methyl
  source 1..20: mol_type = other DNA
tcaaggaagatggcatttct

SEQ ID NO: 16152 - DNA, 20 bp, synthetic construct
  misc_feature 1..20: note = Description of Artificial Sequence: Synthetic Antisense oligonucleotide
  modified_base 1..2: mod_base = OTHER; note = bicyclic nucleic acid (BNA)
  modified_base 10: mod_base = OTHER; note = bicyclic nucleic acid (BNA)
  modified_base 20: mod_base = OTHER; note = bicyclic nucleic acid (BNA)
  modified_base 2: mod_base = OTHER; note = 5-methyl
  modified_base 14: mod_base = OTHER; note = 5-methyl
  modified_base 19: mod_base = OTHER; note = 5-methyl
  source 1..20: mol_type = other DNA
tcaaggaagatggcatttct

SEQ ID NO: 16153 - DNA, 20 bp, synthetic construct
  misc_feature 1..20: note = Description of Artificial Sequence: Synthetic Antisense oligonucleotide
  modified_base 1: mod_base = OTHER; note = bicyclic nucleic acid (BNA)
  modified_base 7: mod_base = OTHER; note = bicyclic nucleic acid (BNA)
  modified_base 15: mod_base = OTHER; note = bicyclic nucleic acid (BNA)
  modified_base 20: mod_base = OTHER; note = bicyclic nucleic acid (BNA)
  modified_base 2: mod_base = OTHER; note = 5-methyl
  modified_base 14: mod_base = OTHER; note = 5-methyl
  modified_base 19: mod_base = OTHER; note = 5-methyl
  source 1..20: mol_type = other DNA
tcaaggaagatggcatttct

SEQ ID NO: 16154 - DNA, 20 bp, synthetic construct
  misc_feature 1..20: note = Description of Artificial Sequence: Synthetic Antisense oligonucleotide
  modified_base 1..2: mod_base = OTHER; note = bicyclic nucleic acid (BNA)
  modified_base 7: mod_base = OTHER; note = bicyclic nucleic acid (BNA)
  modified_base 15: mod_base = OTHER; note = bicyclic nucleic acid (BNA)
  modified_base 20: mod_base = OTHER; note = bicyclic nucleic acid (BNA)
  modified_base 2: mod_base = OTHER; note = 5-methyl
  modified_base 14: mod_base = OTHER; note = 5-methyl
  modified_base 19: mod_base = OTHER; note = 5-methyl
  source 1..20: mol_type = other DNA
tcaaggaagatggcatttct

SEQ ID NO: 16155 - DNA, 20 bp, synthetic construct
  misc_feature 1..20: note = Description of Artificial Sequence: Synthetic Antisense oligonucleotide
  modified_base 1..2: mod_base = OTHER; note = bicyclic nucleic acid (BNA)
  modified_base 7: mod_base = OTHER; note = bicyclic nucleic acid (BNA)
  modified_base 11: mod_base = OTHER; note = bicyclic nucleic acid (BNA)
  modified_base 15: mod_base = OTHER; note = bicyclic nucleic acid (BNA)
  modified_base 20: mod_base = OTHER; note = bicyclic nucleic acid (BNA)
  modified_base 2: mod_base = OTHER; note = 5-methyl
  modified_base 14: mod_base = OTHER; note = 5-methyl
  modified_base 19: mod_base = OTHER; note = 5-methyl
  source 1..20: mol_type = other DNA
tcaaggaagatggcatttct

SEQ ID NO: 16156 - DNA, 20 bp, synthetic construct
  misc_feature 1..20: note = Description of Artificial Sequence: Synthetic Antisense oligonucleotide
  modified_base 1..2: mod_base = OTHER; note = bicyclic nucleic acid (BNA)
  modified_base 6: mod_base = OTHER; note = bicyclic nucleic acid (BNA)
  modified_base 10: mod_base = OTHER; note = bicyclic nucleic acid (BNA)
  modified_base 15: mod_base = OTHER; note = bicyclic nucleic acid (BNA)
  modified_base 20: mod_base = OTHER; note = bicyclic nucleic acid (BNA)
  modified_base 2: mod_base = OTHER; note = 5-methyl
  modified_base 14: mod_base = OTHER; note = 5-methyl
  modified_base 19: mod_base = OTHER; note = 5-methyl
  source 1..20: mol_type = other DNA
tcaaggaagatggcatttct

SEQ ID NO: 16157 - DNA, 20 bp, synthetic construct
  misc_feature 1..20: note = Description of Artificial Sequence: Synthetic Antisense oligonucleotide
  modified_base 1: mod_base = OTHER; note = bicyclic nucleic acid (BNA)
  modified_base 9: mod_base = OTHER; note = bicyclic nucleic acid (BNA)
  modified_base 20: mod_base = OTHER; note = bicyclic nucleic acid (BNA)
  modified_base 2: mod_base = OTHER; note = 5-methyl
  modified_base 14: mod_base = OTHER; note = 5-methyl
  modified_base 19: mod_base = OTHER; note = 5-methyl
  source 1..20: mol_type = other DNA
tcaaggaagatggcatttct

SEQ ID NO: 16158 - DNA, 20 bp, synthetic construct
  misc_feature 1..20: note = Description of Artificial Sequence: Synthetic Antisense oligonucleotide
  modified_base 1: mod_base = OTHER; note = bicyclic nucleic acid (BNA)
  modified_base 13: mod_base = OTHER; note = bicyclic nucleic acid (BNA)
  modified_base 20: mod_base = OTHER; note = bicyclic nucleic acid (BNA)
  modified_base 2: mod_base = OTHER; note = 5-methyl
  modified_base 14: mod_base = OTHER; note = 5-methyl
  modified_base 19: mod_base = OTHER; note = 5-methyl
  source 1..20: mol_type = other DNA
tcaaggaagatggcatttct

SEQ ID NO: 16159 - DNA, 20 bp, synthetic construct
  misc_feature 1..20: note = Description of Artificial Sequence: Synthetic Antisense oligonucleotide
  modified_base 1: mod_base = OTHER; note = bicyclic nucleic acid (BNA)
  modified_base 9: mod_base = OTHER; note = bicyclic nucleic acid (BNA)
  modified_base 13: mod_base = OTHER; note = bicyclic nucleic acid (BNA)
  modified_base 20: mod_base = OTHER; note = bicyclic nucleic acid (BNA)
  modified_base 2: mod_base = OTHER; note = 5-methyl
  modified_base 14: mod_base = OTHER; note = 5-methyl
  modified_base 19: mod_base = OTHER; note = 5-methyl
  source 1..20: mol_type = other DNA
tcaaggaagatggcatttct

SEQ ID NO: 16160 - DNA, 20 bp, synthetic construct
  misc_feature 1..20: note = Description of Artificial Sequence: Synthetic Antisense oligonucleotide
  modified_base 1: mod_base = OTHER; note = bicyclic nucleic acid (BNA)
  modified_base 6: mod_base = OTHER; note = bicyclic nucleic acid (BNA)
  modified_base 9: mod_base = OTHER; note = bicyclic nucleic acid (BNA)
  modified_base 13: mod_base = OTHER; note = bicyclic nucleic acid (BNA)
  modified_base 20: mod_base = OTHER; note = bicyclic nucleic acid (BNA)
  modified_base 2: mod_base = OTHER; note = 5-methyl
  modified_base 14: mod_base = OTHER; note = 5-methyl
  modified_base 19: mod_base = OTHER; note = 5-methyl
  source 1..20: mol_type = other DNA
tcaaggaagatggcatttct

SEQ ID NO: 16161 - DNA, 22 bp, synthetic construct
  misc_feature 1..22: note = Description of Artificial Sequence: Synthetic Antisense oligonucleotide
  modified_base 1: mod_base = OTHER; note = bicyclic nucleic acid (BNA)
  modified_base 2: mod_base = OTHER; note = 5-methyl
  modified_base 14: mod_base = OTHER; note = 5-methyl
  modified_base 19: mod_base = OTHER; note = 5-methyl
  source 1..22: mol_type = other DNA
tcaaggaagatggcatttctag

SEQ ID NO: 16162 - DNA, 22 bp, synthetic construct
  misc_feature 1..22: note = Description of Artificial Sequence: Synthetic Antisense oligonucleotide
  modified_base 1..2: mod_base = OTHER; note = bicyclic nucleic acid (BNA)
  modified_base 2: mod_base = OTHER; note = 5-methyl
  modified_base 14: mod_base = OTHER; note = 5-methyl
  modified_base 19: mod_base = OTHER; note = 5-methyl
  source 1..22: mol_type = other DNA
tcaaggaagatggcatttctag

SEQ ID NO: 16163 - DNA, 22 bp, synthetic construct
  misc_feature 1..22: note = Description of Artificial Sequence: Synthetic Antisense oligonucleotide
  modified_base 1: mod_base = OTHER; note = bicyclic nucleic acid (BNA)
  modified_base 22: mod_base = OTHER; note = bicyclic nucleic acid (BNA)
  modified_base 2: mod_base = OTHER; note = 5-methyl
  modified_base 14: mod_base = OTHER; note = 5-methyl
  modified_base 19: mod_base = OTHER; note = 5-methyl
  source 1..22: mol_type = other DNA
tcaaggaagatggcatttctag

SEQ ID NO: 16164 - DNA, 22 bp, synthetic construct
  misc_feature 1..22: note = Description of Artificial Sequence: Synthetic Antisense oligonucleotide
  modified_base 1..2: mod_base = OTHER; note = bicyclic nucleic acid (BNA)
  modified_base 22: mod_base = OTHER; note = bicyclic nucleic acid (BNA)
  modified_base 2: mod_base = OTHER; note = 5-methyl
  modified_base 14: mod_base = OTHER; note = 5-methyl
  modified_base 19: mod_base = OTHER; note = 5-methyl
  source 1..22: mol_type = other DNA
tcaaggaagatggcatttctag

SEQ ID NO: 16165 - DNA, 22 bp, synthetic construct
  misc_feature 1..22: note = Description of Artificial Sequence: Synthetic Antisense oligonucleotide
  modified_base 1..2: mod_base = OTHER; note = bicyclic nucleic acid (BNA)
  modified_base 10: mod_base = OTHER; note = bicyclic nucleic acid (BNA)
  modified_base 22: mod_base = OTHER; note = bicyclic nucleic acid (BNA)
  modified_base 2: mod_base = OTHER; note = 5-methyl
  modified_base 14: mod_base = OTHER; note = 5-methyl
  modified_base 19: mod_base = OTHER; note = 5-methyl
  source 1..22: mol_type = other DNA
tcaaggaagatggcatttctag

SEQ ID NO: 16166 - DNA, 22 bp, synthetic construct
  misc_feature 1..22: note = Description of Artificial Sequence: Synthetic Antisense oligonucleotide
  modified_base 1..2: mod_base = OTHER; note = bicyclic nucleic acid (BNA)
  modified_base 10: mod_base = OTHER; note = bicyclic nucleic acid (BNA)
  modified_base 15: mod_base = OTHER; note = bicyclic nucleic acid (BNA)
  modified_base 22: mod_base = OTHER; note = bicyclic nucleic acid (BNA)
  modified_base 2: mod_base = OTHER; note = 5-methyl
  modified_base 14: mod_base = OTHER; note = 5-methyl
  modified_base 19: mod_base = OTHER; note = 5-methyl
  source 1..22: mol_type = other DNA
tcaaggaagatggcatttctag

SEQ ID NO: 16167 - DNA, 22 bp, synthetic construct
  misc_feature 1..22: note = Description of Artificial Sequence: Synthetic Antisense oligonucleotide
  modified_base 1..2: mod_base = OTHER; note = bicyclic nucleic acid (BNA)
  modified_base 13: mod_base = OTHER; note = bicyclic nucleic acid (BNA)
  modified_base 22: mod_base = OTHER; note = bicyclic nucleic acid (BNA)
  modified_base 2: mod_base = OTHER; note = 5-methyl
  modified_base 14: mod_base = OTHER; note = 5-methyl
  modified_base 19: mod_base = OTHER; note = 5-methyl
  source 1..22: mol_type = other DNA
tcaaggaagatggcatttctag

SEQ ID NO: 16168 - DNA, 22 bp, synthetic construct
  misc_feature 1..22: note = Description of Artificial Sequence: Synthetic Antisense oligonucleotide
  modified_base 1..2: mod_base = OTHER; note = bicyclic nucleic acid (BNA)
  modified_base 9: mod_base = OTHER; note = bicyclic nucleic acid (BNA)
  modified_base 22: mod_base = OTHER; note = bicyclic nucleic acid (BNA)
  modified_base 2: mod_base = OTHER; note = 5-methyl
  modified_base 14: mod_base = OTHER; note = 5-methyl
  modified_base 19: mod_base = OTHER; note = 5-methyl
  source 1..22: mol_type = other DNA
tcaaggaagatggcatttctag

SEQ ID NO: 16169 - DNA, 22 bp, synthetic construct
  misc_feature 1..22: note = Description of Artificial Sequence: Synthetic Antisense oligonucleotide
  modified_base 1..2: mod_base = OTHER; note = bicyclic nucleic acid (BNA)
  modified_base 9: mod_base = OTHER; note = bicyclic nucleic acid (BNA)
  modified_base 13: mod_base = OTHER; note = bicyclic nucleic acid (BNA)
  modified_base 22: mod_base = OTHER; note = bicyclic nucleic acid (BNA)
  modified_base 2: mod_base = OTHER; note = 5-methyl
  modified_base 14: mod_base = OTHER; note = 5-methyl
  modified_base 19: mod_base = OTHER; note = 5-methyl
  source 1..22: mol_type = other DNA
tcaaggaagatggcatttctag

SEQ ID NO: 16170 - DNA, 22 bp, synthetic construct
  misc_feature 1..22: note = Description of Artificial Sequence: Synthetic Antisense oligonucleotide
  modified_base 1..2: mod_base = OTHER; note = bicyclic nucleic acid (BNA)
  modified_base 5: mod_base = OTHER; note = bicyclic nucleic acid (BNA)
  modified_base 9: mod_base = OTHER; note = bicyclic nucleic acid (BNA)
  modified_base 13: mod_base = OTHER; note = bicyclic nucleic acid (BNA)
  modified_base 22: mod_base = OTHER; note = bicyclic nucleic acid (BNA)
  modified_base 2: mod_base = OTHER; note = 5-methyl
  modified_base 14: mod_base = OTHER; note = 5-methyl
  modified_base 19: mod_base = OTHER; note = 5-methyl
  source 1..22: mol_type = other DNA
tcaaggaagatggcatttctag

SEQ ID NO: 16171 - DNA, 16 bp, synthetic construct
  misc_feature 1..16: note = Description of Artificial Sequence: Synthetic Antisense oligonucleotide
  modified_base 1: mod_base = OTHER; note = bicyclic nucleic acid (BNA)
  modified_base 16: mod_base = OTHER; note = bicyclic nucleic acid (BNA)
  modified_base 2: mod_base = OTHER; note = 5-methyl
  modified_base 14: mod_base = OTHER; note = 5-methyl
  source 1..16: mol_type = other DNA
tcaaggaagatggcat

SEQ ID NO: 16172 - DNA, 16 bp, synthetic construct
  misc_feature 1..16: note = Description of Artificial Sequence: Synthetic Antisense oligonucleotide
  modified_base 1: mod_base = OTHER; note = bicyclic nucleic acid (BNA)
  modified_base 13: mod_base = OTHER; note = bicyclic nucleic acid (BNA)
  modified_base 16: mod_base = OTHER; note = bicyclic nucleic acid (BNA)
  modified_base 2: mod_base = OTHER; note = 5-methyl
  modified_base 14: mod_base = OTHER; note = 5-methyl
  source 1..16: mol_type = other DNA
tcaaggaagatggcat

SEQ ID NO: 16173 - DNA, 16 bp, synthetic construct
  misc_feature 1..16: note = Description of Artificial Sequence: Synthetic Antisense oligonucleotide
  modified_base 2: mod_base = OTHER; note = 5-methyl
  modified_base 14: mod_base = OTHER; note = 5-methyl
  modified_base 13: mod_base = OTHER; note = bicyclic nucleic acid (BNA)
  source 1..16: mol_type = other DNA
tcaaggaagatggcat

SEQ ID NO: 16174 - DNA, 15 bp, synthetic construct
  misc_feature 1..15: note = Description of Artificial Sequence: Synthetic Antisense oligonucleotide
  modified_base 1: mod_base = OTHER; note = bicyclic nucleic acid (BNA)
  modified_base 8: mod_base = OTHER; note = bicyclic nucleic acid (BNA)
  modified_base 15: mod_base = OTHER; note = bicyclic nucleic acid (BNA)
  modified_base 9: mod_base = OTHER; note = 5-methyl
  modified_base 14: mod_base = OTHER; note = 5-methyl
  source 1..15: mol_type = other DNA
gaagatggcatttct

SEQ ID NO: 16175 - RNA, 18 nt, synthetic construct
  misc_feature 1..18: note = Description of Artificial Sequence: Synthetic Antisense oligonucleotide
  source 1..18: mol_type = other RNA
ggtaagttctgtccaagc

SEQ ID NO: 16176 - RNA, 20 nt, synthetic construct
  misc_feature 1..20: note = Description of Artificial Sequence: Synthetic Antisense oligonucleotide
  source 1..20: mol_type = other RNA
tcaaggaagatggcatttct

SEQ ID NO: 16177 - RNA, 18 nt, synthetic construct
  misc_feature 1..18: note = Description of Artificial Sequence: Synthetic Antisense oligonucleotide
  source 1..18: mol_type = other RNA
ggtaagttctgtccaagc

SEQ ID NO: 16178 - RNA, 20 nt, synthetic construct
  misc_feature 1..20: note = Description of Artificial Sequence: Synthetic Antisense oligonucleotide
  source 1..20: mol_type = other RNA
tcaaggaagatggcatttct

SEQ ID NO: 16179 - RNA, 18 nt, synthetic construct
  misc_feature 1..18: note = Description of Artificial Sequence: Synthetic Antisense oligonucleotide
  source 1..18: mol_type = other RNA
ggtaagttctgtccaagc

SEQ ID NO: 16180 - RNA, 22 nt, synthetic construct
  misc_feature 1..22: note = Description of Artificial Sequence: Synthetic Antisense oligonucleotide
  source 1..22: mol_type = other RNA
tcaaggaagatggcatttctag

SEQ ID NO: 16181 - RNA, 18 nt, synthetic construct
  misc_feature 1..18: note = Description of Artificial Sequence: Synthetic Antisense oligonucleotide
  source 1..18: mol_type = other RNA
ggtaagttctgtccaagc

SEQ ID NO: 16182 - RNA, 22 nt, synthetic construct
  misc_feature 1..22: note = Description of Artificial Sequence: Synthetic Antisense oligonucleotide
  source 1..22: mol_type = other RNA
tcaaggaagatggcatttctag

SEQ ID NO: 16183 - RNA, 18 nt, synthetic construct
  misc_feature 1..18: note = Description of Artificial Sequence: Synthetic Antisense oligonucleotide
  source 1..18: mol_type = other RNA
gtaagttctgtccaagcc

SEQ ID NO: 16184 - RNA, 20 nt, synthetic construct
  misc_feature 1..20: note = Description of Artificial Sequence: Synthetic Antisense oligonucleotide
  source 1..20: mol_type = other RNA
tcaaggaagatggcatttct

SEQ ID NO: 16185 - RNA, 18 nt, synthetic construct
  misc_feature 1..18: note = Description of Artificial Sequence: Synthetic Antisense oligonucleotide
  source 1..18: mol_type = other RNA
gtaagttctgtccaagcc

SEQ ID NO: 16186 - RNA, 20 nt, synthetic construct
  misc_feature 1..20: note = Description of Artificial Sequence: Synthetic Antisense oligonucleotide
  source 1..20: mol_type = other RNA
tcaaggaagatggcatttct

SEQ ID NO: 16187 - RNA, 18 nt, synthetic construct
  misc_feature 1..18: note = Description of Artificial Sequence: Synthetic Antisense oligonucleotide
  source 1..18: mol_type = other RNA
gtaagttctgtccaagcc

SEQ ID NO: 16188 - RNA, 22 nt, synthetic construct
  misc_feature 1..22: note = Description of Artificial Sequence: Synthetic Antisense oligonucleotide
  source 1..22: mol_type = other RNA
tcaaggaagatggcatttctag

SEQ ID NO: 16189 - RNA, 18 nt, synthetic construct
  misc_feature 1..18: note = Description of Artificial Sequence: Synthetic Antisense oligonucleotide
  source 1..18: mol_type = other RNA
gtaagttctgtccaagcc

SEQ ID NO: 16190 - RNA, 22 nt, synthetic construct
  misc_feature 1..22: note = Description of Artificial Sequence: Synthetic Antisense oligonucleotide
  source 1..22: mol_type = other RNA
tcaaggaagatggcatttctag

SEQ ID NO: 16191 - RNA, 18 nt, synthetic construct
  misc_feature 1..18: note = Description of Artificial Sequence: Synthetic Antisense oligonucleotide
  source 1..18: mol_type = other RNA
agtcggtaagttctgtcc

SEQ ID NO: 16192 - RNA, 20 nt, synthetic construct
  misc_feature 1..20: note = Description of Artificial Sequence: Synthetic Antisense oligonucleotide
  source 1..20: mol_type = other RNA
tcaaggaagatggcatttct

SEQ ID NO: 16193 - RNA, 18 nt, synthetic construct
  misc_feature 1..18: note = Description of Artificial Sequence: Synthetic Antisense oligonucleotide
  source 1..18: mol_type = other RNA
agtcggtaagttctgtcc

SEQ ID NO: 16194 - RNA, 20 nt, synthetic construct
  misc_feature 1..20: note = Description of Artificial Sequence: Synthetic Antisense oligonucleotide
  source 1..20: mol_type = other RNA
tcaaggaagatggcatttct

SEQ ID NO: 16195 - RNA, 18 nt, synthetic construct
  misc_feature 1..18: note = Description of Artificial Sequence: Synthetic Antisense oligonucleotide
  source 1..18: mol_type = other RNA
agtcggtaagttctgtcc

SEQ ID NO: 16196 - RNA, 22 nt, synthetic construct
  misc_feature 1..22: note = Description of Artificial Sequence: Synthetic Antisense oligonucleotide
  source 1..22: mol_type = other RNA
tcaaggaagatggcatttctag

SEQ ID NO: 16197 - RNA, 18 nt, synthetic construct
  misc_feature 1..18: note = Description of Artificial Sequence: Synthetic Antisense oligonucleotide
  source 1..18: mol_type = other RNA
agtcggtaagttctgtcc

SEQ ID NO: 16198 - RNA, 22 nt, synthetic construct
  misc_feature 1..22: note = Description of Artificial Sequence: Synthetic Antisense oligonucleotide
  source 1..22: mol_type = other RNA
tcaaggaagatggcatttctag

SEQ ID NO: 16199 - RNA, 18 nt, synthetic construct
  misc_feature 1..18: note = Description of Artificial Sequence: Synthetic Antisense oligonucleotide
  source 1..18: mol_type = other RNA
ctgtccaagcccggttga

SEQ ID NO: 16200 - RNA, 20 nt, synthetic construct
  misc_feature 1..20: note = Description of Artificial Sequence: Synthetic Antisense oligonucleotide
  source 1..20: mol_type = other RNA
tcaaggaagatggcatttct

SEQ ID NO: 16201 - RNA, 18 nt, synthetic construct
  misc_feature 1..18: note = Description of Artificial Sequence: Synthetic Antisense oligonucleotide
  source 1..18: mol_type = other RNA
ctgtccaagcccggttga

SEQ ID NO: 16202 - RNA, 20 nt, synthetic construct
  misc_feature 1..20: note = Description of Artificial Sequence: Synthetic Antisense oligonucleotide
  source 1..20: mol_type = other RNA
tcaaggaagatggcatttct

SEQ ID NO: 16203 - RNA, 18 nt, synthetic construct
  misc_feature 1..18: note = Description of Artificial Sequence: Synthetic Antisense oligonucleotide
  source 1..18: mol_type = other RNA
ctgtccaagcccggttga

SEQ ID NO: 16204 - RNA, 22 nt, synthetic construct
  misc_feature 1..22: note = Description of Artificial Sequence: Synthetic Antisense oligonucleotide
  source 1..22: mol_type = other RNA
tcaaggaagatggcatttctag

SEQ ID NO: 16205 - RNA, 18 nt, synthetic construct
  misc_feature 1..18: note = Description of Artificial Sequence: Synthetic Antisense oligonucleotide
  source 1..18: mol_type = other RNA
ctgtccaagcccggttga

SEQ ID NO: 16206 - RNA, 22 nt, synthetic construct
  misc_feature 1..22: note = Description of Artificial Sequence: Synthetic Antisense oligonucleotide
  source 1..22: mol_type = other RNA
tcaaggaagatggcatttctag

SEQ ID NO: 16207 - RNA, 15 nt, synthetic construct
  misc_feature 1..15: note = Description of Artificial Sequence: Synthetic Antisense oligonucleotide
  source 1..15: mol_type = other RNA
taagttctgtccaag

SEQ ID NO: 16208 - RNA, 16 nt, synthetic construct
  misc_feature 1..16: note = Description of Artificial Sequence: Synthetic Antisense oligonucleotide
  source 1..16: mol_type = other RNA
tcaaggaagatggcat

SEQ ID NO: 16209 - RNA, 15 nt, synthetic construct
  misc_feature 1..15: note = Description of Artificial Sequence: Synthetic Antisense oligonucleotide
  source 1..15: mol_type = other RNA
taagttctgtccaag

SEQ ID NO: 16210 - RNA, 16 nt, synthetic construct
  misc_feature 1..16: note = Description of Artificial Sequence: Synthetic Antisense oligonucleotide
  source 1..16: mol_type = other RNA
tcaaggaagatggcat

SEQ ID NO: 16211 - RNA, 15 nt, synthetic construct
  misc_feature 1..15: note = Description of Artificial Sequence: Synthetic Antisense oligonucleotide
  source 1..15: mol_type = other RNA
taagttctgtccaag

SEQ ID NO: 16212 - RNA, 15 nt, synthetic construct
  misc_feature 1..15: note = Description of Artificial Sequence: Synthetic Antisense oligonucleotide
  source 1..15: mol_type = other RNA
gaagatggcatttct

SEQ ID NO: 16213 - RNA, 15 nt, synthetic construct
  misc_feature 1..15: note = Description of Artificial Sequence: Synthetic Antisense oligonucleotide
  source 1..15: mol_type = other RNA
taagttctgtccaag

SEQ ID NO: 16214 - RNA, 15 nt, synthetic construct
  misc_feature 1..15: note = Description of Artificial Sequence: Synthetic Antisense oligonucleotide
  source 1..15: mol_type = other RNA
gaagatggcatttct

SEQ ID NO: 16215 - RNA, 18 nt, synthetic construct
  misc_feature 1..18: note = Description of Artificial Sequence: Synthetic Antisense oligonucleotide
  modified_base 9: mod_base = OTHER; note = 5-methyl
  modified_base 13..14: mod_base = OTHER; note = 5-methyl
  modified_base 18: mod_base = OTHER; note = 5-methyl
  source 1..18: mol_type = other RNA
ggtaagttctgtccaagc

SEQ ID NO: 16216 - RNA, 20 nt, synthetic construct
  misc_feature 1..20: note = Description of Artificial Sequence: Synthetic Antisense oligonucleotide
  modified_base 2: mod_base = OTHER; note = 5-methyl
  modified_base 14: mod_base = OTHER; note = 5-methyl
  modified_base 19: mod_base = OTHER; note = 5-methyl
  source 1..20: mol_type = other RNA
tcaaggaagatggcatttct

SEQ ID NO: 16217 - RNA, 18 nt, synthetic construct
  misc_feature 1..18: note = Description of Artificial Sequence: Synthetic Antisense oligonucleotide
  modified_base 9: mod_base = OTHER; note = 5-methyl
  modified_base 13..14: mod_base = OTHER; note = 5-methyl
  modified_base 18: mod_base = OTHER; note = 5-methyl
  source 1..18: mol_type = other RNA
ggtaagttctgtccaagc

SEQ ID NO: 16218 - RNA, 20 nt, synthetic construct
  misc_feature 1..20: note = Description of Artificial Sequence: Synthetic Antisense oligonucleotide
  modified_base 2: mod_base = OTHER; note = 5-methyl
  modified_base 14: mod_base = OTHER; note = 5-methyl
  modified_base 19: mod_base = OTHER; note = 5-methyl
  source 1..20: mol_type = other RNA
tcaaggaagatggcatttct

SEQ ID NO: 16219 - RNA, 18 nt, synthetic construct
  misc_feature 1..18: note = Description of Artificial Sequence: Synthetic Antisense oligonucleotide
  modified_base 9: mod_base = OTHER; note = 5-methyl
  modified_base 13..14: mod_base = OTHER; note = 5-methyl
  modified_base 18: mod_base = OTHER; note = 5-methyl
  source 1..18: mol_type = other RNA
ggtaagttctgtccaagc

SEQ ID NO: 16220 - RNA, 22 nt, synthetic construct
  misc_feature 1..22: note = Description of Artificial Sequence: Synthetic Antisense oligonucleotide
  modified_base 2: mod_base = OTHER; note = 5-methyl
  modified_base 14: mod_base = OTHER; note = 5-methyl
  modified_base 19: mod_base = OTHER; note = 5-methyl
  source 1..22: mol_type = other RNA
tcaaggaagatggcatttctag

SEQ ID NO: 16221 - RNA, 18 nt, synthetic construct
  misc_feature 1..18: note = Description of Artificial Sequence: Synthetic Antisense oligonucleotide
  modified_base 9: mod_base = OTHER; note = 5-methyl
  modified_base 13..14: mod_base = OTHER; note = 5-methyl
  modified_base 18: mod_base = OTHER; note = 5-methyl
  source 1..18: mol_type = other RNA
ggtaagttctgtccaagc

SEQ ID NO: 16222 - RNA, 22 nt, synthetic construct
  misc_feature 1..22: note = Description of Artificial Sequence: Synthetic Antisense oligonucleotide
  modified_base 2: mod_base = OTHER; note = 5-methyl
  modified_base 14: mod_base = OTHER; note = 5-methyl
  modified_base 19: mod_base = OTHER; note = 5-methyl
  source 1..22: mol_type = other RNA
tcaaggaagatggcatttctag

SEQ ID NO: 16223 - RNA, 18 nt, synthetic construct
  misc_feature 1..18: note = Description of Artificial Sequence: Synthetic Antisense oligonucleotide
  modified_base 8: mod_base = OTHER; note = 5-methyl
  modified_base 12..13: mod_base = OTHER; note = 5-methyl
  modified_base 17..18: mod_base = OTHER; note = 5-methyl
  source 1..18: mol_type = other RNA
gtaagttctgtccaagcc

SEQ ID NO: 16224 - RNA, 20 nt, synthetic construct
  misc_feature 1..20: note = Description of Artificial Sequence: Synthetic Antisense oligonucleotide
  modified_base 2: mod_base = OTHER; note = 5-methyl
  modified_base 14: mod_base = OTHER; note = 5-methyl
  modified_base 19: mod_base = OTHER; note = 5-methyl
  source 1..20: mol_type = other RNA
tcaaggaagatggcatttct

SEQ ID NO: 16225 - RNA, 18 nt, synthetic construct
  misc_feature 1..18: note = Description of Artificial Sequence: Synthetic Antisense oligonucleotide
  modified_base 8: mod_base = OTHER; note = 5-methyl
  modified_base 12..13: mod_base = OTHER; note = 5-methyl
  modified_base 17..18: mod_base = OTHER; note = 5-methyl
  source 1..18: mol_type = other RNA
gtaagttctgtccaagcc

SEQ ID NO: 16226 - RNA, 20 nt, synthetic construct
  misc_feature 1..20: note = Description of Artificial Sequence: Synthetic Antisense oligonucleotide
  modified_base 2: mod_base = OTHER; note = 5-methyl
  modified_base 14: mod_base = OTHER; note = 5-methyl
  modified_base 19: mod_base = OTHER; note = 5-methyl
  source 1..20: mol_type = other RNA
tcaaggaagatggcatttct

SEQ ID NO: 16227 - RNA, 18 nt, synthetic construct
  misc_feature 1..18: note = Description of Artificial Sequence: Synthetic Antisense oligonucleotide
  modified_base 8: mod_base = OTHER; note = 5-methyl
  modified_base 12..13: mod_base = OTHER; note = 5-methyl
  modified_base 17..18: mod_base = OTHER; note = 5-methyl
  source 1..18: mol_type = other RNA
gtaagttctgtccaagcc

SEQ ID NO: 16228 - RNA, 22 nt, synthetic construct
  misc_feature 1..22: note = Description of Artificial Sequence: Synthetic Antisense oligonucleotide
  modified_base 2: mod_base = OTHER; note = 5-methyl
  modified_base 14: mod_base = OTHER; note = 5-methyl
  modified_base 19: mod_base = OTHER; note = 5-methyl
  source 1..22: mol_type = other RNA
tcaaggaagatggcatttctag

SEQ ID NO: 16229 - RNA, 18 nt, synthetic construct
  misc_feature 1..18: note = Description of Artificial Sequence: Synthetic Antisense oligonucleotide
  modified_base 8: mod_base = OTHER; note = 5-methyl
  modified_base 12..13: mod_base = OTHER; note = 5-methyl
  modified_base 17..18: mod_base = OTHER; note = 5-methyl
  source 1..18: mol_type = other RNA
gtaagttctgtccaagcc

SEQ ID NO: 16230 - RNA, 22 nt, synthetic construct
  misc_feature 1..22: note = Description of Artificial Sequence: Synthetic Antisense oligonucleotide
  modified_base 2: mod_base = OTHER; note = 5-methyl
  modified_base 14: mod_base = OTHER; note = 5-methyl
  modified_base 19: mod_base = OTHER; note = 5-methyl
  source 1..22: mol_type = other RNA
tcaaggaagatggcatttctag

SEQ ID NO: 16231 - RNA, 18 nt, synthetic construct
  misc_feature 1..18: note = Description of Artificial Sequence: Synthetic Antisense oligonucleotide
  modified_base 4: mod_base = OTHER; note = 5-methyl
  modified_base 13: mod_base = OTHER; note = 5-methyl
  modified_base 17..18: mod_base = OTHER; note = 5-methyl
  source 1..18: mol_type = other RNA
agtcggtaagttctgtcc

SEQ ID NO: 16232 - RNA, 20 nt, synthetic construct
  misc_feature 1..20: note = Description of Artificial Sequence: Synthetic Antisense oligonucleotide
  modified_base 2: mod_base = OTHER; note = 5-methyl
  modified_base 14: mod_base = OTHER; note = 5-methyl
  modified_base 19: mod_base = OTHER; note = 5-methyl
  source 1..20: mol_type = other RNA
tcaaggaagatggcatttct

SEQ ID NO: 16233 - RNA, 18 nt, synthetic construct
  misc_feature 1..18: note = Description of Artificial Sequence: Synthetic Antisense oligonucleotide
  modified_base 4: mod_base = OTHER; note = 5-methyl
  modified_base 13: mod_base = OTHER; note = 5-methyl
  modified_base 17..18: mod_base = OTHER; note = 5-methyl
  source 1..18: mol_type = other RNA
agtcggtaagttctgtcc

SEQ ID NO: 16234 - RNA, 20 nt, synthetic construct
  misc_feature 1..20: note = Description of Artificial Sequence: Synthetic Antisense oligonucleotide
  modified_base 2: mod_base = OTHER; note = 5-methyl
  modified_base 14: mod_base = OTHER; note = 5-methyl
  modified_base 19: mod_base = OTHER; note = 5-methyl
  source 1..20: mol_type = other RNA
tcaaggaagatggcatttct

SEQ ID NO: 16235 - RNA, 18 nt, synthetic construct
  misc_feature 1..18: note = Description of Artificial Sequence: Synthetic Antisense oligonucleotide
  modified_base 4: mod_base = OTHER; note = 5-methyl
  modified_base 13: mod_base = OTHER; note = 5-methyl
  modified_base 17..18: mod_base = OTHER; note = 5-methyl
  source 1..18: mol_type = other RNA
agtcggtaagttctgtcc

SEQ ID NO: 16236 - RNA, 22 nt, synthetic construct
  misc_feature 1..22: note = Description of Artificial Sequence: Synthetic Antisense oligonucleotide
  modified_base 2: mod_base = OTHER; note = 5-methyl
  modified_base 14: mod_base = OTHER; note = 5-methyl
  modified_base 19: mod_base = OTHER; note = 5-methyl
  source 1..22: mol_type = other RNA
tcaaggaagatggcatttctag

SEQ ID NO: 16237 - RNA, 18 nt, synthetic construct
  misc_feature 1..18: note = Description of Artificial Sequence: Synthetic Antisense oligonucleotide
  modified_base 4: mod_base = OTHER; note = 5-methyl
  modified_base 13: mod_base = OTHER; note = 5-methyl
  modified_base 17..18: mod_base = OTHER; note = 5-methyl
  source 1..18: mol_type = other RNA
agtcggtaagttctgtcc

SEQ ID NO: 16238 - RNA, 22 nt, synthetic construct
  misc_feature 1..22: note = Description of Artificial Sequence: Synthetic Antisense oligonucleotide
  modified_base 2: mod_base = OTHER; note = 5-methyl
  modified_base 14: mod_base = OTHER; note = 5-methyl
  modified_base 19: mod_base = OTHER; note = 5-methyl
  source 1..22: mol_type = other RNA
tcaaggaagatggcatttctag

SEQ ID NO: 16239 - RNA, 18 nt, synthetic construct
  misc_feature 1..18: note = Description of Artificial Sequence: Synthetic Antisense oligonucleotide
  modified_base 1: mod_base = OTHER; note = 5-methyl
  modified_base 5..6: mod_base = OTHER; note = 5-methyl
  modified_base 10..12: mod_base = OTHER; note = 5-methyl
  source 1..18: mol_type = other RNA
ctgtccaagcccggttga

SEQ ID NO: 16240 - RNA, 20 nt, synthetic construct
  misc_feature 1..20: note = Description of Artificial Sequence: Synthetic Antisense oligonucleotide
  modified_base 2: mod_base = OTHER; note = 5-methyl
  modified_base 14: mod_base = OTHER; note = 5-methyl
  modified_base 19: mod_base = OTHER; note = 5-methyl
  source 1..20: mol_type = other RNA
tcaaggaagatggcatttct

SEQ ID NO: 16241 - RNA, 18 nt, synthetic construct
  misc_feature 1..18: note = Description of Artificial Sequence: Synthetic Antisense oligonucleotide
  modified_base 1: mod_base = OTHER; note = 5-methyl
  modified_base 5..6: mod_base = OTHER; note = 5-methyl
  modified_base 10..12: mod_base = OTHER; note = 5-methyl
  source 1..18: mol_type = other RNA
ctgtccaagcccggttga

SEQ ID NO: 16242 - RNA, 20 nt, synthetic construct
  misc_feature 1..20: note = Description of Artificial Sequence: Synthetic Antisense oligonucleotide
  modified_base 2: mod_base = OTHER; note = 5-methyl
  modified_base 14: mod_base = OTHER; note = 5-methyl
  modified_base 19: mod_base = OTHER; note = 5-methyl
  source 1..20: mol_type = other RNA
tcaaggaagatggcatttct

SEQ ID NO: 16243 - RNA, 18 nt, synthetic construct
  misc_feature 1..18: note = Description of Artificial Sequence: Synthetic Antisense oligonucleotide
  modified_base 1: mod_base = OTHER; note = 5-methyl
  modified_base 5..6: mod_base = OTHER; note = 5-methyl
  modified_base 10..12: mod_base = OTHER; note = 5-methyl
  source 1..18: mol_type = other RNA
ctgtccaagcccggttga

SEQ ID NO: 16244 - RNA, 22 nt, synthetic construct
  misc_feature 1..22: note = Description of Artificial Sequence: Synthetic Antisense oligonucleotide
  modified_base 2: mod_base = OTHER; note = 5-methyl
  modified_base 14: mod_base = OTHER; note = 5-methyl
  modified_base 19: mod_base = OTHER; note = 5-methyl
  source 1..22: mol_type = other RNA
tcaaggaagatggcatttctag

SEQ ID NO: 16245 - RNA, 18 nt, synthetic construct
  misc_feature 1..18: note = Description of Artificial Sequence: Synthetic Antisense oligonucleotide
  modified_base 1: mod_base = OTHER; note = 5-methyl
  modified_base 5..6: mod_base = OTHER; note = 5-methyl
  modified_base 10..12: mod_base = OTHER; note = 5-methyl
  source 1..18: mol_type = other RNA
ctgtccaagcccggttga

SEQ ID NO: 16246 - RNA, 22 nt, synthetic construct
  misc_feature 1..22: note = Description of Artificial Sequence: Synthetic Antisense oligonucleotide
  modified_base 2: mod_base = OTHER; note = 5-methyl
  modified_base 14: mod_base = OTHER; note = 5-methyl
  modified_base 19: mod_base = OTHER; note = 5-methyl
  source 1..22: mol_type = other RNA
tcaaggaagatggcatttctag

SEQ ID NO: 16247 - RNA, 15 nt, synthetic construct
  misc_feature 1..15: note = Description of Artificial Sequence: Synthetic Antisense oligonucleotide
  modified_base 7: mod_base = OTHER; note = 5-methyl
  modified_base 11..12: mod_base = OTHER; note = 5-methyl
  source 1..15: mol_type = other RNA
taagttctgtccaag

SEQ ID NO: 16248 - RNA, 16 nt, synthetic construct
  misc_feature 1..16: note = Description of Artificial Sequence: Synthetic Antisense oligonucleotide
  modified_base 2: mod_base = OTHER; note = 5-methyl
  modified_base 14: mod_base = OTHER; note = 5-methyl
  source 1..16: mol_type = other RNA
tcaaggaagatggcat

SEQ ID NO: 16249 - RNA, 15 nt, synthetic construct
  misc_feature 1..15: note = Description of Artificial Sequence: Synthetic Antisense oligonucleotide
  modified_base 7: mod_base = OTHER; note = 5-methyl
  modified_base 11..12: mod_base = OTHER; note = 5-methyl
  source 1..15: mol_type = other RNA
taagttctgtccaag

SEQ ID NO: 16250 - RNA, 16 nt, synthetic construct
  misc_feature 1..16: note = Description of Artificial Sequence: Synthetic Antisense oligonucleotide
  modified_base 2: mod_base = OTHER; note = 5-methyl
  modified_base 14: mod_base = OTHER; note = 5-methyl
  source 1..16: mol_type = other RNA
tcaaggaagatggcat

SEQ ID NO: 16251 - RNA, 15 nt, synthetic construct
  misc_feature 1..15: note = Description of Artificial Sequence: Synthetic Antisense oligonucleotide
  modified_base 7: mod_base = OTHER; note = 5-methyl
  modified_base 11..12: mod_base = OTHER; note = 5-methyl
  source 1..15: mol_type = other RNA
taagttctgtccaag

SEQ ID NO: 16252 - RNA, 15 nt, synthetic construct
  misc_feature 1..15: note = Description of Artificial Sequence: Synthetic Antisense oligonucleotide
  modified_base 9: mod_base = OTHER; note = 5-methyl
  modified_base 14: mod_base = OTHER; note = 5-methyl
  source 1..15: mol_type = other RNA
gaagatggcatttct

SEQ ID NO: 16253 - RNA, 15 nt, synthetic construct
  misc_feature 1..15: note = Description of Artificial Sequence: Synthetic Antisense oligonucleotide
  modified_base 7: mod_base = OTHER; note = 5-methyl
  modified_base 11..12: mod_base = OTHER; note = 5-methyl
  source 1..15: mol_type = other RNA
taagttctgtccaag

SEQ ID NO: 16254 - RNA, 15 nt, synthetic construct
  misc_feature 1..15: note = Description of Artificial Sequence: Synthetic Antisense oligonucleotide
  modified_base 9: mod_base = OTHER; note = 5-methyl
  modified_base 14: mod_base = OTHER; note = 5-methyl
  source 1..15: mol_type = other RNA
gaagatggcatttct

SEQ ID NO: 16255 - DNA, 18 bp, synthetic construct
  misc_feature 1..18: note = Description of Artificial Sequence: Synthetic Antisense oligonucleotide
  source 1..18: mol_type = other DNA
ggtaagttctgtccaagc

SEQ ID NO: 16256 - DNA, 20 bp, synthetic construct
  misc_feature 1..20: note = Description of Artificial Sequence: Synthetic Antisense oligonucleotide
  source 1..20: mol_type = other DNA
tcaaggaagatggcatttct

SEQ ID NO: 16257 - DNA, 18 bp, synthetic construct
  misc_feature 1..18: note = Description of Artificial Sequence: Synthetic Antisense oligonucleotide
  source 1..18: mol_type = other DNA
ggtaagttctgtccaagc

SEQ ID NO: 16258 - DNA, 20 bp, synthetic construct
  misc_feature 1..20: note = Description of Artificial Sequence: Synthetic Antisense oligonucleotide
  source 1..20: mol_type = other DNA
tcaaggaagatggcatttct

SEQ ID NO: 16259 - DNA, 18 bp, synthetic construct
  misc_feature 1..18: note = Description of Artificial Sequence: Synthetic Antisense oligonucleotide
  source 1..18: mol_type = other DNA
ggtaagttctgtccaagc

SEQ ID NO: 16260 - DNA, 22 bp, synthetic construct
  misc_feature 1..22: note = Description of Artificial Sequence: Synthetic Antisense oligonucleotide
  source 1..22: mol_type = other DNA
tcaaggaagatggcatttctag

SEQ ID NO: 16261 - DNA, 18 bp, synthetic construct
  misc_feature 1..18: note = Description of Artificial Sequence: Synthetic Antisense oligonucleotide
  source 1..18: mol_type = other DNA
ggtaagttctgtccaagc

SEQ ID NO: 16262 - DNA, 22 bp, synthetic construct
  misc_feature 1..22: note = Description of Artificial Sequence: Synthetic Antisense oligonucleotide
  source 1..22: mol_type = other DNA
tcaaggaagatggcatttctag

SEQ ID NO: 16263 - DNA, 18 bp, synthetic construct
  misc_feature 1..18: note = Description of Artificial Sequence: Synthetic Antisense oligonucleotide
  source 1..18: mol_type = other DNA
gtaagttctgtccaagcc

SEQ ID NO: 16264 - DNA, 20 bp, synthetic construct
  misc_feature 1..20: note = Description of Artificial Sequence: Synthetic Antisense oligonucleotide
  source 1..20: mol_type = other DNA
tcaaggaagatggcatttct

SEQ ID NO: 16265 - DNA, 18 bp, synthetic construct
  misc_feature 1..18: note = Description of Artificial Sequence: Synthetic Antisense oligonucleotide
  source 1..18: mol_type = other DNA
gtaagttctgtccaagcc

SEQ ID NO: 16266 - DNA, 20 bp, synthetic construct
  misc_feature 1..20: note = Description of Artificial Sequence: Synthetic Antisense oligonucleotide
  source 1..20: mol_type = other DNA
tcaaggaagatggcatttct

SEQ ID NO: 16267 - DNA, 18 bp, synthetic construct
  misc_feature 1..18: note = Description of Artificial Sequence: Synthetic Antisense oligonucleotide
  source 1..18: mol_type = other DNA
gtaagttctgtccaagcc

SEQ ID NO: 16268 - DNA, 22 bp, synthetic construct
  misc_feature 1..22: note = Description of Artificial Sequence: Synthetic Antisense oligonucleotide
  source 1..22: mol_type = other DNA
tcaaggaagatggcatttctag

SEQ ID NO: 16269 - DNA, 18 bp, synthetic construct
  misc_feature 1..18: note = Description of Artificial Sequence: Synthetic Antisense oligonucleotide
  source 1..18: mol_type = other DNA
gtaagttctgtccaagcc

SEQ ID NO: 16270 - DNA, 22 bp, synthetic construct
  misc_feature 1..22: note = Description of Artificial Sequence: Synthetic Antisense oligonucleotide
  source 1..22: mol_type = other DNA
tcaaggaagatggcatttctag

SEQ ID NO: 16271 - DNA, 18 bp, synthetic construct
  misc_feature 1..18: note = Description of Artificial Sequence: Synthetic Antisense oligonucleotide
  source 1..18: mol_type = other DNA
agtcggtaagttctgtcc

SEQ ID NO: 16272 - DNA, 20 bp, synthetic construct
  misc_feature 1..20: note = Description of Artificial Sequence: Synthetic Antisense oligonucleotide
  source 1..20: mol_type = other DNA
tcaaggaagatggcatttct

SEQ ID NO: 16273 - DNA, 18 bp, synthetic construct
  misc_feature 1..18: note = Description of Artificial Sequence: Synthetic Antisense oligonucleotide
  source 1..18: mol_type = other DNA
agtcggtaagttctgtcc

SEQ ID NO: 16274 - DNA, 20 bp, synthetic construct
  misc_feature 1..20: note = Description of Artificial Sequence: Synthetic Antisense oligonucleotide
  source 1..20: mol_type = other DNA
tcaaggaagatggcatttct

SEQ ID NO: 16275 - DNA, 18 bp, synthetic construct
  misc_feature 1..18: note = Description of Artificial Sequence: Synthetic Antisense oligonucleotide
  source 1..18: mol_type = other DNA
agtcggtaagttctgtcc

SEQ ID NO: 16276 - DNA, 22 bp, synthetic construct
  misc_feature 1..22: note = Description of Artificial Sequence: Synthetic Antisense oligonucleotide
  source 1..22: mol_type = other DNA
tcaaggaagatggcatttctag

SEQ ID NO: 16277 - DNA, 18 bp, synthetic construct
  misc_feature 1..18: note = Description of Artificial Sequence: Synthetic Antisense oligonucleotide
  source 1..18: mol_type = other DNA
agtcggtaagttctgtcc

SEQ ID NO: 16278 - DNA, 22 bp, synthetic construct
  misc_feature 1..22: note = Description of Artificial Sequence: Synthetic Antisense oligonucleotide
  source 1..22: mol_type = other DNA
tcaaggaagatggcatttctag

SEQ ID NO: 16279 - DNA, 18 bp, synthetic construct
  misc_feature 1..18: note = Description of Artificial Sequence: Synthetic Antisense oligonucleotide
  source 1..18: mol_type = other DNA
ctgtccaagcccggttga

SEQ ID NO: 16280 - DNA, 20 bp, synthetic construct
  misc_feature 1..20: note = Description of Artificial Sequence: Synthetic Antisense oligonucleotide
  source 1..20: mol_type = other DNA
tcaaggaagatggcatttct

SEQ ID NO: 16281 - DNA, 18 bp, synthetic construct
  misc_feature 1..18: note = Description of Artificial Sequence: Synthetic Antisense oligonucleotide
  source 1..18: mol_type = other DNA
ctgtccaagcccggttga

SEQ ID NO: 16282 - DNA, 20 bp, synthetic construct
  misc_feature 1..20: note = Description of Artificial Sequence: Synthetic Antisense oligonucleotide
  source 1..20: mol_type = other DNA
tcaaggaagatggcatttct

SEQ ID NO: 16283 - DNA, 18 bp, synthetic construct
  misc_feature 1..18: note = Description of Artificial Sequence: Synthetic Antisense oligonucleotide
  source 1..18: mol_type = other DNA
ctgtccaagcccggttga

SEQ ID NO: 16284 - DNA, 22 bp, synthetic construct
  misc_feature 1..22: note = Description of Artificial Sequence: Synthetic Antisense oligonucleotide
  source 1..22: mol_type = other DNA
tcaaggaagatggcatttctag

SEQ ID NO: 16285 - DNA, 18 bp, synthetic construct
  misc_feature 1..18: note = Description of Artificial Sequence: Synthetic Antisense oligonucleotide
  source 1..18: mol_type = other DNA
ctgtccaagcccggttga

SEQ ID NO: 16286 - DNA, 22 bp, synthetic construct
  misc_feature 1..22: note = Description of Artificial Sequence: Synthetic Antisense oligonucleotide
  source 1..22: mol_type = other DNA
tcaaggaagatggcatttctag

SEQ ID NO: 16287 - DNA, 15 bp, synthetic construct
  misc_feature 1..15: note = Description of Artificial Sequence: Synthetic Antisense oligonucleotide
  source 1..15: mol_type = other DNA
taagttctgtccaag

SEQ ID NO: 16288 - DNA, 16 bp, synthetic construct
  misc_feature 1..16: note = Description of Artificial Sequence: Synthetic Antisense oligonucleotide
  source 1..16: mol_type = other DNA
tcaaggaagatggcat

SEQ ID NO: 16289 - DNA, 15 bp, synthetic construct
  misc_feature 1..15: note = Description of Artificial Sequence: Synthetic Antisense oligonucleotide
  source 1..15: mol_type = other DNA
taagttctgtccaag

SEQ ID NO: 16290 - DNA, 16 bp, synthetic construct
  misc_feature 1..16: note = Description of Artificial Sequence: Synthetic Antisense oligonucleotide
  source 1..16: mol_type = other DNA
tcaaggaagatggcat

SEQ ID NO: 16291 - DNA, 15 bp, synthetic construct
  misc_feature 1..15: note = Description of Artificial Sequence: Synthetic Antisense oligonucleotide
  source 1..15: mol_type = other DNA
taagttctgtccaag

SEQ ID NO: 16292 - DNA, 15 bp, synthetic construct
  misc_feature 1..15: note = Description of Artificial Sequence: Synthetic Antisense oligonucleotide
  source 1..15: mol_type = other DNA
gaagatggcatttct

SEQ ID NO: 16293 - DNA, 15 bp, synthetic construct
  misc_feature 1..15: note = Description of Artificial Sequence: Synthetic Antisense oligonucleotide
  source 1..15: mol_type = other DNA
taagttctgtccaag

SEQ ID NO: 16294 - DNA, 15 bp, synthetic construct
  misc_feature 1..15: note = Description of Artificial Sequence: Synthetic Antisense oligonucleotide
  source 1..15: mol_type = other DNA
gaagatggcatttct

SEQ ID NO: 16295 - DNA, 18 bp, synthetic construct
  misc_feature 1..18: note = Description of Artificial Sequence: Synthetic Antisense oligonucleotide
  modified_base 9: mod_base = OTHER; note = 5-methyl
  modified_base 13..14: mod_base = OTHER; note = 5-methyl
  modified_base 18: mod_base = OTHER; note = 5-methyl
  source 1..18: mol_type = other DNA
ggtaagttctgtccaagc

SEQ ID NO: 16296 - DNA, 20 bp, synthetic construct
  misc_feature 1..20: note = Description of Artificial Sequence: Synthetic Antisense oligonucleotide
  modified_base 2: mod_base = OTHER; note = 5-methyl
  modified_base 14: mod_base = OTHER; note = 5-methyl
  modified_base 19: mod_base = OTHER; note = 5-methyl
  source 1..20: mol_type = other DNA
tcaaggaagatggcatttct

SEQ ID NO: 16297 - DNA, 18 bp, synthetic construct
  misc_feature 1..18: note = Description of Artificial Sequence: Synthetic Antisense oligonucleotide
  modified_base 9: mod_base = OTHER; note = 5-methyl
  modified_base 13..14: mod_base = OTHER; note = 5-methyl
  modified_base 18: mod_base = OTHER; note = 5-methyl
  source 1..18: mol_type = other DNA
ggtaagttctgtccaagc

SEQ ID NO: 16298 - DNA, 20 bp, synthetic construct
  misc_feature 1..20: note = Description of Artificial Sequence: Synthetic Antisense oligonucleotide
  modified_base 2: mod_base = OTHER; note = 5-methyl
  modified_base 14: mod_base = OTHER; note = 5-methyl
  modified_base 19: mod_base = OTHER; note = 5-methyl
  source 1..20: mol_type = other DNA
tcaaggaagatggcatttct

SEQ ID NO: 16299 - DNA, 18 bp, synthetic construct
  misc_feature 1..18: note = Description of Artificial Sequence: Synthetic Antisense oligonucleotide
  modified_base 9: mod_base = OTHER; note = 5-methyl
  modified_base 13..14: mod_base = OTHER; note = 5-methyl
  modified_base 18: mod_base = OTHER; note = 5-methyl
  source 1..18: mol_type = other DNA
ggtaagttctgtccaagc

SEQ ID NO: 16300 - DNA, 22 bp, synthetic construct
  misc_feature 1..22: note = Description of Artificial Sequence: Synthetic Antisense oligonucleotide
  modified_base 2: mod_base = OTHER; note = 5-methyl
  modified_base 14: mod_base = OTHER; note = 5-methyl
  modified_base 19: mod_base = OTHER; note = 5-methyl
  source 1..22: mol_type = other DNA
tcaaggaagatggcatttctag

SEQ ID NO: 16301 - DNA, 18 bp, synthetic construct
  misc_feature 1..18: note = Description of Artificial Sequence: Synthetic Antisense oligonucleotide
  modified_base 9: mod_base = OTHER; note = 5-methyl
  modified_base 13..14: mod_base = OTHER; note = 5-methyl
  modified_base 18: mod_base = OTHER; note = 5-methyl
  source 1..18: mol_type = other DNA
ggtaagttctgtccaagc

SEQ ID NO: 16302 - DNA, 22 bp, synthetic construct
  misc_feature 1..22: note = Description of Artificial Sequence: Synthetic Antisense oligonucleotide
  modified_base 2: mod_base = OTHER; note = 5-methyl
  modified_base 14: mod_base = OTHER; note = 5-methyl
  modified_base 19: mod_base = OTHER; note = 5-methyl
  source 1..22: mol_type = other DNA
tcaaggaagatggcatttctag

SEQ ID NO: 16303 - DNA, 18 bp, synthetic construct
  misc_feature 1..18: note = Description of Artificial Sequence: Synthetic Antisense oligonucleotide
  modified_base 8: mod_base = OTHER; note = 5-methyl
  modified_base 12..13: mod_base = OTHER; note = 5-methyl
  modified_base 17..18: mod_base = OTHER; note = 5-methyl
  source 1..18: mol_type = other DNA
gtaagttctgtccaagcc

SEQ ID NO: 16304 - DNA, 20 bp, synthetic construct
  misc_feature 1..20: note = Description of Artificial Sequence: Synthetic Antisense oligonucleotide
  modified_base 2: mod_base = OTHER; note = 5-methyl
  modified_base 14: mod_base = OTHER; note = 5-methyl
  modified_base 19: mod_base = OTHER; note = 5-methyl
  source 1..20: mol_type = other DNA
tcaaggaagatggcatttct

SEQ ID NO: 16305 - DNA, 18 bp, synthetic construct
  misc_feature 1..18: note = Description of Artificial Sequence: Synthetic Antisense oligonucleotide
  modified_base 8: mod_base = OTHER; note = 5-methyl
  modified_base 12..13: mod_base = OTHER; note = 5-methyl
  modified_base 17..18: mod_base = OTHER; note = 5-methyl
  source 1..18: mol_type = other DNA
gtaagttctgtccaagcc

SEQ ID NO: 16306 - DNA, 20 bp, synthetic construct
  misc_feature 1..20: note = Description of Artificial Sequence: Synthetic Antisense oligonucleotide
  modified_base 2: mod_base = OTHER; note = 5-methyl
  modified_base 14: mod_base = OTHER; note = 5-methyl
  modified_base 19: mod_base = OTHER; note = 5-methyl
  source 1..20: mol_type = other DNA
tcaaggaagatggcatttct

SEQ ID NO: 16307 - DNA, 18 bp, synthetic construct
  misc_feature 1..18: note = Description of Artificial Sequence: Synthetic Antisense oligonucleotide
  modified_base 8: mod_base = OTHER; note = 5-methyl
  modified_base 12..13: mod_base = OTHER; note = 5-methyl
  modified_base 17..18: mod_base = OTHER; note = 5-methyl
  source 1..18: mol_type = other DNA
gtaagttctgtccaagcc

SEQ ID NO: 16308 - DNA, 22 bp, synthetic construct
  misc_feature 1..22: note = Description of Artificial Sequence: Synthetic Antisense oligonucleotide
  modified_base 2: mod_base = OTHER; note = 5-methyl
  modified_base 14: mod_base = OTHER; note = 5-methyl
  modified_base 19: mod_base = OTHER; note = 5-methyl
  source 1..22: mol_type = other DNA
tcaaggaagatggcatttctag

SEQ ID NO: 16309 - DNA, 18 bp, synthetic construct
  misc_feature 1..18: note = Description of Artificial Sequence: Synthetic Antisense oligonucleotide
  modified_base 8: mod_base = OTHER; note = 5-methyl
  modified_base 12..13: mod_base = OTHER; note = 5-methyl
  modified_base 17..18: mod_base = OTHER; note = 5-methyl
  source 1..18: mol_type = other DNA
gtaagttctgtccaagcc

SEQ ID NO: 16310 - DNA, 22 bp, synthetic construct
  misc_feature 1..22: note = Description of Artificial Sequence: Synthetic Antisense oligonucleotide
  modified_base 2: mod_base = OTHER; note = 5-methyl
  modified_base 14: mod_base = OTHER; note = 5-methyl
  modified_base 19: mod_base = OTHER; note = 5-methyl
  source 1..22: mol_type = other DNA
tcaaggaagatggcatttctag

SEQ ID NO: 16311 - DNA, 18 bp, synthetic construct
  misc_feature 1..18: note = Description of Artificial Sequence: Synthetic Antisense oligonucleotide
  modified_base 4: mod_base = OTHER; note = 5-methyl
  modified_base 13: mod_base = OTHER; note = 5-methyl
  modified_base 17..18: mod_base = OTHER; note = 5-methyl
  source 1..18: mol_type = other DNA
agtcggtaagttctgtcc

SEQ ID NO: 16312 - DNA, 20 bp, synthetic construct
  misc_feature 1..20: note = Description of Artificial Sequence: Synthetic Antisense oligonucleotide
  modified_base 2: mod_base = OTHER; note = 5-methyl
  modified_base 14: mod_base = OTHER; note = 5-methyl
  modified_base 19: mod_base = OTHER; note = 5-methyl
  source 1..20: mol_type = other DNA
tcaaggaagatggcatttct

SEQ ID NO: 16313 - DNA, 18 bp, synthetic construct
  misc_feature 1..18: note = Description of Artificial Sequence: Synthetic Antisense oligonucleotide
  modified_base 4: mod_base = OTHER; note = 5-methyl
  modified_base 13: mod_base = OTHER; note = 5-methyl
  modified_base 17..18: mod_base = OTHER; note = 5-methyl
  source 1..18: mol_type = other DNA
agtcggtaagttctgtcc

SEQ ID NO: 16314 - DNA, 20 bp, synthetic construct
  misc_feature 1..20: note = Description of Artificial Sequence: Synthetic Antisense oligonucleotide
  modified_base 2: mod_base = OTHER; note = 5-methyl
  modified_base 14: mod_base = OTHER; note = 5-methyl
  modified_base 19: mod_base = OTHER; note = 5-methyl
  source 1..20: mol_type = other DNA
tcaaggaagatggcatttct

SEQ ID NO: 16315 - DNA, 18 bp, synthetic construct
  misc_feature 1..18: note = Description of Artificial Sequence: Synthetic Antisense oligonucleotide
  modified_base 4: mod_base = OTHER; note = 5-methyl
  modified_base 13: mod_base = OTHER; note = 5-methyl
  modified_base 17..18: mod_base = OTHER; note = 5-methyl
  source 1..18: mol_type = other DNA
agtcggtaagttctgtcc

SEQ ID NO: 16316 - DNA, 22 bp, synthetic construct
  misc_feature 1..22: note = Description of Artificial Sequence: Synthetic Antisense oligonucleotide
  modified_base 2: mod_base = OTHER; note = 5-methyl
  modified_base 14: mod_base = OTHER; note = 5-methyl
  modified_base 19: mod_base = OTHER; note = 5-methyl
  source 1..22: mol_type = other DNA
tcaaggaagatggcatttctag

SEQ ID NO: 16317 - DNA, 18 bp, synthetic construct
  misc_feature 1..18: note = Description of Artificial Sequence: Synthetic Antisense oligonucleotide
  modified_base 4: mod_base = OTHER; note = 5-methyl
  modified_base 13: mod_base = OTHER; note = 5-methyl
  modified_base 17..18: mod_base = OTHER; note = 5-methyl
  source 1..18: mol_type = other DNA
agtcggtaagttctgtcc

SEQ ID NO: 16318 - DNA, 22 bp, synthetic construct
  misc_feature 1..22: note = Description of Artificial Sequence: Synthetic Antisense oligonucleotide
  modified_base 2: mod_base = OTHER; note = 5-methyl
  modified_base 14: mod_base = OTHER; note = 5-methyl
  modified_base 19: mod_base = OTHER; note = 5-methyl
  source 1..22: mol_type = other DNA
tcaaggaagatggcatttctag

SEQ ID NO: 16319 - DNA, 18 bp, synthetic construct
  misc_feature 1..18: note = Description of Artificial Sequence: Synthetic Antisense oligonucleotide
  modified_base 1: mod_base = OTHER; note = 5-methyl
  modified_base 5..6: mod_base = OTHER; note = 5-methyl
  modified_base 10..12: mod_base = OTHER; note = 5-methyl
  source 1..18: mol_type = other DNA
ctgtccaagcccggttga

SEQ ID NO: 16320 - DNA, 20 bp, synthetic construct
  misc_feature 1..20: note = Description of Artificial Sequence: Synthetic Antisense oligonucleotide
  modified_base 2: mod_base = OTHER; note = 5-methyl
  modified_base 14: mod_base = OTHER; note = 5-methyl
  modified_base 19: mod_base = OTHER; note = 5-methyl
  source 1..20: mol_type = other DNA
tcaaggaagatggcatttct

SEQ ID NO: 16321 - DNA, 18 bp, synthetic construct
  misc_feature 1..18: note = Description of Artificial Sequence: Synthetic Antisense oligonucleotide
  modified_base 1: mod_base = OTHER; note = 5-methyl
  modified_base 5..6: mod_base = OTHER; note = 5-methyl
  modified_base 10..12: mod_base = OTHER; note = 5-methyl
  source 1..18: mol_type = other DNA
ctgtccaagcccggttga

SEQ ID NO: 16322 - DNA, 20 bp, synthetic construct
  misc_feature 1..20: note = Description of Artificial Sequence: Synthetic Antisense oligonucleotide
  modified_base 2: mod_base = OTHER; note = 5-methyl
  modified_base 14: mod_base = OTHER; note = 5-methyl
  modified_base 19: mod_base = OTHER; note = 5-methyl
  source 1..20: mol_type = other DNA
tcaaggaagatggcatttct

SEQ ID NO: 16323 - DNA, 18 bp, synthetic construct
  misc_feature 1..18: note = Description of Artificial Sequence: Synthetic Antisense oligonucleotide
  modified_base 1: mod_base = OTHER; note = 5-methyl
  modified_base 5..6: mod_base = OTHER; note = 5-methyl
  modified_base 10..12: mod_base = OTHER; note = 5-methyl
  source 1..18: mol_type = other DNA
ctgtccaagcccggttga

SEQ ID NO: 16324 - DNA, 22 bp, synthetic construct
  misc_feature 1..22: note = Description of Artificial Sequence: Synthetic Antisense oligonucleotide
  modified_base 2: mod_base = OTHER; note = 5-methyl
  modified_base 14: mod_base = OTHER; note = 5-methyl
  modified_base 19: mod_base = OTHER; note = 5-methyl
  source 1..22: mol_type = other DNA
tcaaggaagatggcatttctag

SEQ ID NO: 16325 - DNA, 18 bp, synthetic construct
  misc_feature 1..18: note = Description of Artificial Sequence: Synthetic Antisense oligonucleotide
  modified_base 1: mod_base = OTHER; note = 5-methyl
  modified_base 5..6: mod_base = OTHER; note = 5-methyl
  modified_base 10..12: mod_base = OTHER; note = 5-methyl
  source 1..18: mol_type = other DNA
ctgtccaagcccggttga

SEQ ID NO: 16326 - DNA, 22 bp, synthetic construct
  misc_feature 1..22: note = Description of Artificial Sequence: Synthetic Antisense oligonucleotide
  modified_base 2: mod_base = OTHER; note = 5-methyl
  modified_base 14: mod_base = OTHER; note = 5-methyl
  modified_base 19: mod_base = OTHER; note = 5-methyl
  source 1..22: mol_type = other DNA
tcaaggaagatggcatttctag

SEQ ID NO: 16327 - DNA, 15 bp, synthetic construct
  misc_feature 1..15: note = Description of Artificial Sequence: Synthetic Antisense oligonucleotide
  modified_base 7: mod_base = OTHER; note = 5-methyl
  modified_base 11..12: mod_base = OTHER; note = 5-methyl
  source 1..15: mol_type = other DNA
taagttctgtccaag

SEQ ID NO: 16328 - DNA, 16 bp, synthetic construct
  misc_feature 1..16: note = Description of Artificial Sequence: Synthetic Antisense oligonucleotide
  modified_base 2: mod_base = OTHER; note = 5-methyl
  modified_base 14: mod_base = OTHER; note = 5-methyl
  source 1..16: mol_type = other DNA
tcaaggaagatggcat

SEQ ID NO: 16329 - DNA, 15 bp, synthetic construct
  misc_feature 1..15: note = Description of Artificial Sequence: Synthetic Antisense oligonucleotide
  modified_base 7: mod_base = OTHER; note = 5-methyl
  modified_base 11..12: mod_base = OTHER; note = 5-methyl
  source 1..15: mol_type = other DNA
taagttctgtccaag

SEQ ID NO: 16330 - DNA, 16 bp, synthetic construct
  misc_feature 1..16: note = Description of Artificial Sequence: Synthetic Antisense oligonucleotide
  modified_base 2: mod_base = OTHER; note = 5-methyl
  modified_base 14: mod_base = OTHER; note = 5-methyl
  source 1..16: mol_type = other DNA
tcaaggaagatggcat

SEQ ID NO: 16331 - DNA, 15 bp, synthetic construct
  misc_feature 1..15: note = Description of Artificial Sequence: Synthetic Antisense oligonucleotide
  modified_base 7: mod_base = OTHER; note = 5-methyl
  modified_base 11..12: mod_base = OTHER; note = 5-methyl
  source 1..15: mol_type = other DNA
taagttctgtccaag

SEQ ID NO: 16332 - DNA, 15 bp, synthetic construct
  misc_feature 1..15: note = Description of Artificial Sequence: Synthetic Antisense oligonucleotide
  modified_base 9: mod_base = OTHER; note = 5-methyl
  modified_base 14: mod_base = OTHER; note = 5-methyl
  source 1..15: mol_type = other DNA
gaagatggcatttct

SEQ ID NO: 16333 - DNA, 15 bp, synthetic construct
  misc_feature 1..15: note = Description of Artificial Sequence: Synthetic Antisense oligonucleotide
  modified_base 7: mod_base = OTHER; note = 5-methyl
  modified_base 11..12: mod_base = OTHER; note = 5-methyl
  source 1..15: mol_type = other DNA
taagttctgtccaag

SEQ ID NO: 16334 - DNA, 15 bp, synthetic construct
  misc_feature 1..15: note = Description of Artificial Sequence: Synthetic Antisense oligonucleotide
  modified_base 9: mod_base = OTHER; note = 5-methyl
  modified_base 14: mod_base = OTHER; note = 5-methyl
  source 1..15: mol_type = other DNA
gaagatggcatttct

SEQ ID NO: 16335 - RNA, 18 nt, synthetic construct
  misc_feature 1..18: note = Description of Artificial Sequence: Synthetic Antisense oligonucleotide
  source 1..18: mol_type = other RNA
ggtaagttctgtccaagc

SEQ ID NO: 16336 - DNA, 20 bp, synthetic construct
  misc_feature 1..20: note = Description of Artificial Sequence: Synthetic Antisense oligonucleotide
  misc_feature 1..20: note = Original Sequence: tcaaggaagauggcauuuct
  source 1..20: mol_type = other DNA
  modified_base 11: mod_base = OTHER; note = Uracil
  modified_base 16: mod_base = OTHER; note = Uracil
  modified_base 17: mod_base = OTHER; note = Uracil
  modified_base 18: mod_base = OTHER; note = Uracil
tcaaggaagatggcatttct

SEQ ID NO: 16337 - RNA, 18 nt, synthetic construct
  misc_feature 1..18: note = Description of Artificial Sequence: Synthetic Antisense oligonucleotide
  source 1..18: mol_type = other RNA
ggtaagttctgtccaagc

SEQ ID NO: 16338 - DNA, 20 bp, synthetic construct
  misc_feature 1..20: note = Description of Artificial Sequence: Synthetic Antisense oligonucleotide
  misc_feature 1..20: note = Original Sequence: tcaaggaagauggcauuuct
  source 1..20: mol_type = other DNA
  modified_base 11: mod_base = OTHER; note = Uracil
  modified_base 16: mod_base = OTHER; note = Uracil
  modified_base 17: mod_base = OTHER; note = Uracil
  modified_base 18: mod_base = OTHER; note = Uracil
tcaaggaagatggcatttct

SEQ ID NO: 16339 - DNA, 15 bp, synthetic construct
  misc_feature 1..15: note = Description of Artificial Sequence: Synthetic Antisense oligonucleotide
  source 1..15: mol_type = other DNA
taagttctgtccaag

SEQ ID NO: 16340 - DNA, 15 bp, synthetic construct
  misc_feature 1..15: note = Description of Artificial Sequence: Synthetic Antisense oligonucleotide
  source 1..15: mol_type = other DNA
gaagatggcatttct

SEQ ID NO: 16341 - DNA, 15 bp, synthetic construct
  misc_feature 1..15: note = Description of Artificial Sequence: Synthetic Antisense oligonucleotide
  source 1..15: mol_type = other DNA
taagttctgtccaag

SEQ ID NO: 16342 - DNA, 15 bp, synthetic construct
  misc_feature 1..15: note = Description of Artificial Sequence: Synthetic Antisense oligonucleotide
  source 1..15: mol_type = other DNA
gaagatggcatttct

SEQ ID NO: 16343 - DNA, 15 bp, synthetic construct
  misc_feature 1..15: note = Description of Artificial Sequence: Synthetic Antisense oligonucleotide
  source 1..15: mol_type = other DNA
taagttctgtccaag

SEQ ID NO: 16344 - DNA, 16 bp, synthetic construct
  misc_feature 1..16: note = Description of Artificial Sequence: Synthetic Antisense oligonucleotide
  source 1..16: mol_type = other DNA
tcaaggaagatggcat

SEQ ID NO: 16345 - DNA, 15 bp, synthetic construct
  misc_feature 1..15: note = Description of Artificial Sequence: Synthetic Antisense oligonucleotide
  source 1..15: mol_type = other DNA
taagttctgtccaag

SEQ ID NO: 16346 - DNA, 16 bp, synthetic construct
  misc_feature 1..16: note = Description of Artificial Sequence: Synthetic Antisense oligonucleotide
  source 1..16: mol_type = other DNA
tcaaggaagatggcat

SEQ ID NO: 16347 - DNA, 15 bp, synthetic construct
  misc_feature 1..15: note = Description of Artificial Sequence: Synthetic Antisense oligonucleotide
  source 1..15: mol_type = other DNA
taagttctgtccaag

SEQ ID NO: 16348 - DNA, 16 bp, synthetic construct
  misc_feature 1..16: note = Description of Artificial Sequence: Synthetic Antisense oligonucleotide
  source 1..16: mol_type = other DNA
tcaaggaagatggcat

SEQ ID NO: 16349 - DNA, 15 bp, synthetic construct
  misc_feature 1..15: note = Description of Artificial Sequence: Synthetic Antisense oligonucleotide
  source 1..15: mol_type = other DNA
taagttctgtccaag

SEQ ID NO: 16350 - DNA, 16 bp, synthetic construct
  misc_feature 1..16: note = Description of Artificial Sequence: Synthetic Antisense oligonucleotide
  source 1..16: mol_type = other DNA
tcaaggaagatggcat

SEQ ID NO: 16351 - DNA, 31 bp, synthetic construct
  misc_feature 1..31: note = Description of Artificial Sequence: Synthetic Antisense oligonucleotide
  source 1..31: mol_type = other DNA
taagttctgtccaagtcaaggaagatggcat

SEQ ID NO: 16352 - DNA, 31 bp, synthetic construct
  misc_feature 1..31: note = Description of Artificial Sequence: Synthetic Antisense oligonucleotide
  source 1..31: mol_type = other DNA
tcaaggaagatggcattaagttctgtccaag

SEQ ID NO: 16353 - DNA, 19 bp, synthetic construct
  misc_feature 1..19: note = Description of Artificial Sequence: Synthetic Antisense oligonucleotide
  misc_feature 1..19: note = Original Sequence: caaggaagauggcauuuct
  source 1..19: mol_type = other DNA
  modified_base 10: mod_base = OTHER; note = Uracil
  modified_base 15: mod_base = OTHER; note = Uracil
  modified_base 16: mod_base = OTHER; note = Uracil
  modified_base 17: mod_base = OTHER; note = Uracil
caaggaagatggcatttct

SEQ ID NO: 16354 - RNA, 20 nt, synthetic construct
  misc_feature 1..20: note = Description of Artificial Sequence: Synthetic Antisense oligonucleotide
  source 1..20: mol_type = other RNA
tcaaggaagatggcatttct

SEQ ID NO: 16355 - RNA, 18 nt, synthetic construct
  misc_feature 1..18: note = Description of Artificial Sequence: Synthetic Antisense oligonucleotide
  source 1..18: mol_type = other RNA
ggtaagttctgtccaagc

SEQ ID NO: 16356 - RNA, 20 nt, synthetic construct
  misc_feature 1..20: note = Description of Artificial Sequence: Synthetic Antisense oligonucleotide
  source 1..20: mol_type = other RNA
tcaaggaagatggcatttct

SEQ ID NO: 16357 - RNA, 18 nt, synthetic construct
  misc_feature 1..18: note = Description of Artificial Sequence: Synthetic Antisense oligonucleotide
  source 1..18: mol_type = other RNA
ggtaagttctgtccaagc

SEQ ID NO: 16358 - RNA, 22 nt, synthetic construct
  misc_feature 1..22: note = Description of Artificial Sequence: Synthetic Antisense oligonucleotide
  source 1..22: mol_type = other RNA
tcaaggaagatggcatttctag

SEQ ID NO: 16359 - RNA, 18 nt, synthetic construct
  misc_feature 1..18: note = Description of Artificial Sequence: Synthetic Antisense oligonucleotide
  source 1..18: mol_type = other RNA
ggtaagttctgtccaagc

SEQ ID NO: 16360 - RNA, 22 nt, synthetic construct
  misc_feature 1..22: note = Description of Artificial Sequence: Synthetic Antisense oligonucleotide
  source 1..22: mol_type = other RNA
tcaaggaagatggcatttctag

SEQ ID NO: 16361 - RNA, 18 nt, synthetic construct
  misc_feature 1..18: note = Description of Artificial Sequence: Synthetic Antisense oligonucleotide
  source 1..18: mol_type = other RNA
ggtaagttctgtccaagc

SEQ ID NO: 16362 - RNA, 20 nt, synthetic construct
  misc_feature 1..20: note = Description of Artificial Sequence: Synthetic Antisense oligonucleotide
  source 1..20: mol_type = other RNA
tcaaggaagatggcatttct

SEQ ID NO: 16363 - RNA, 18 nt, synthetic construct
  misc_feature 1..18: note = Description of Artificial Sequence: Synthetic Antisense oligonucleotide
  source 1..18: mol_type = other RNA
gtaagttctgtccaagcc

SEQ ID NO: 16364 - RNA, 20 nt, synthetic construct
  misc_feature 1..20: note = Description of Artificial Sequence: Synthetic Antisense oligonucleotide
  source 1..20: mol_type = other RNA
tcaaggaagatggcatttct

SEQ ID NO: 16365 - RNA, 18 nt, synthetic construct
  misc_feature 1..18: note = Description of Artificial Sequence: Synthetic Antisense oligonucleotide
  source 1..18: mol_type = other RNA
gtaagttctgtccaagcc

SEQ ID NO: 16366 - RNA, 22 nt, synthetic construct
  misc_feature 1..22: note = Description of Artificial Sequence: Synthetic Antisense oligonucleotide
  source 1..22: mol_type = other RNA
tcaaggaagatggcatttctag

SEQ ID NO: 16367 - RNA, 18 nt, synthetic construct
  misc_feature 1..18: note = Description of Artificial Sequence: Synthetic Antisense oligonucleotide
  source 1..18: mol_type = other RNA
gtaagttctgtccaagcc

SEQ ID NO: 16368 - RNA, 22 nt, synthetic construct
  misc_feature 1..22: note = Description of Artificial Sequence: Synthetic Antisense oligonucleotide
  source 1..22: mol_type = other RNA
tcaaggaagatggcatttctag

SEQ ID NO: 16369 - RNA, 18 nt, synthetic construct
  misc_feature 1..18: note = Description of Artificial Sequence: Synthetic Antisense oligonucleotide
  source 1..18: mol_type = other RNA
gtaagttctgtccaagcc

SEQ ID NO: 16370 - RNA, 20 nt, synthetic construct
  misc_feature 1..20: note = Description of Artificial Sequence: Synthetic Antisense oligonucleotide
  source 1..20: mol_type = other RNA
tcaaggaagatggcatttct

SEQ ID NO: 16371 - RNA, 18 nt, synthetic construct
  misc_feature 1..18: note = Description of Artificial Sequence: Synthetic Antisense oligonucleotide
  source 1..18: mol_type = other RNA
agtcggtaagttctgtcc

SEQ ID NO: 16372 - RNA, 20 nt, synthetic construct
  misc_feature 1..20: note = Description of Artificial Sequence: Synthetic Antisense oligonucleotide
  source 1..20: mol_type = other RNA
tcaaggaagatggcatttct

SEQ ID NO: 16373 - RNA, 18 nt, synthetic construct
  misc_feature 1..18: note = Description of Artificial Sequence: Synthetic Antisense oligonucleotide
  source 1..18: mol_type = other RNA
agtcggtaagttctgtcc

SEQ ID NO: 16374 - RNA, 22 nt, synthetic construct
  misc_feature 1..22: note = Description of Artificial Sequence: Synthetic Antisense oligonucleotide
  source 1..22: mol_type = other RNA
tcaaggaagatggcatttctag

SEQ ID NO: 16375 - RNA, 18 nt, synthetic construct
  misc_feature 1..18: note = Description of Artificial Sequence: Synthetic Antisense oligonucleotide
  source 1..18: mol_type = other RNA
agtcggtaagttctgtcc

SEQ ID NO: 16376 - RNA, 22 nt, synthetic construct
  misc_feature 1..22: note = Description of Artificial Sequence: Synthetic Antisense oligonucleotide
  source 1..22: mol_type = other RNA
tcaaggaagatggcatttctag

SEQ ID NO: 16377 - RNA, 18 nt, synthetic construct
  misc_feature 1..18: note = Description of Artificial Sequence: Synthetic Antisense oligonucleotide
  source 1..18: mol_type = other RNA
agtcggtaagttctgtcc

SEQ ID NO: 16378 - RNA, 20 nt, synthetic construct
  misc_feature 1..20: note = Description of Artificial Sequence: Synthetic Antisense oligonucleotide
  source 1..20: mol_type = other RNA
tcaaggaagatggcatttct

SEQ ID NO: 16379 - RNA, 18 nt, synthetic construct
  misc_feature 1..18: note = Description of Artificial Sequence: Synthetic Antisense oligonucleotide
  source 1..18: mol_type = other RNA
ctgtccaagcccggttga

SEQ ID NO: 16380 - RNA, 20 nt, synthetic construct
  misc_feature 1..20: note = Description of Artificial Sequence: Synthetic Antisense oligonucleotide
  source 1..20: mol_type = other RNA
tcaaggaagatggcatttct

SEQ ID NO: 16381 - RNA, 18 nt, synthetic construct
  misc_feature 1..18: note = Description of Artificial Sequence: Synthetic Antisense oligonucleotide
  source 1..18: mol_type = other RNA
ctgtccaagcccggttga

SEQ ID NO: 16382 - RNA, 22 nt, synthetic construct
  misc_feature 1..22: note = Description of Artificial Sequence: Synthetic Antisense oligonucleotide
  source 1..22: mol_type = other RNA
tcaaggaagatggcatttctag

SEQ ID NO: 16383 - RNA, 18 nt, synthetic construct
  misc_feature 1..18: note = Description of Artificial Sequence: Synthetic Antisense oligonucleotide
  source 1..18: mol_type = other RNA
ctgtccaagcccggttga

SEQ ID NO: 16384 - RNA, 22 nt, synthetic construct
  misc_feature 1..22: note = Description of Artificial Sequence: Synthetic Antisense oligonucleotide
  source 1..22: mol_type = other RNA
tcaaggaagatggcatttctag

SEQ ID NO: 16385 - RNA, 18 nt, synthetic construct
  misc_feature 1..18: note = Description of Artificial Sequence: Synthetic Antisense oligonucleotide
  source 1..18: mol_type = other RNA
ctgtccaagcccggttga

SEQ ID NO: 16386 - RNA, 16 nt, synthetic construct
  misc_feature 1..16: note = Description of Artificial Sequence: Synthetic Antisense oligonucleotide
  source 1..16: mol_type = other RNA
tcaaggaagatggcat

SEQ ID NO: 16387 - RNA, 15 nt, synthetic construct
  misc_feature 1..15: note = Description of Artificial Sequence: Synthetic Antisense oligonucleotide
  source 1..15: mol_type = other RNA
taagttctgtccaag

SEQ ID NO: 16388 - RNA, 16 nt, synthetic construct
  misc_feature 1..16: note = Description of Artificial Sequence: Synthetic Antisense oligonucleotide
  source 1..16: mol_type = other RNA
tcaaggaagatggcat

SEQ ID NO: 16389 - RNA, 15 nt, synthetic construct
  misc_feature 1..15: note = Description of Artificial Sequence: Synthetic Antisense oligonucleotide
  source 1..15: mol_type = other RNA
taagttctgtccaag

SEQ ID NO: 16390 - RNA, 15 nt, synthetic construct
  misc_feature 1..15: note = Description of Artificial Sequence: Synthetic Antisense oligonucleotide
  source 1..15: mol_type = other RNA
gaagatggcatttct

SEQ ID NO: 16391 - RNA, 15 nt, synthetic construct
  misc_feature 1..15: note = Description of Artificial Sequence: Synthetic Antisense oligonucleotide
  source 1..15: mol_type = other RNA
taagttctgtccaag

SEQ ID NO: 16392 - RNA, 15 nt, synthetic construct
  misc_feature 1..15: note = Description of Artificial Sequence: Synthetic Antisense oligonucleotide
  source 1..15: mol_type = other RNA
gaagatggcatttct

SEQ ID NO: 16393 - RNA, 15 nt, synthetic construct
  misc_feature 1..15: note = Description of Artificial Sequence: Synthetic Antisense oligonucleotide
  source 1..15: mol_type = other RNA
taagttctgtccaag

SEQ ID NO: 16394 - RNA, 20 nt, synthetic construct
  misc_feature 1..20: note = Description of Artificial Sequence: Synthetic Antisense oligonucleotide
  modified_base 2: mod_base = OTHER; note = 5-methyl
  modified_base 14: mod_base = OTHER; note = 5-methyl
  modified_base 19: mod_base = OTHER; note = 5-methyl
  source 1..20: mol_type = other RNA
tcaaggaagatggcatttct

SEQ ID NO: 16395 - RNA, 18 nt, synthetic construct
  misc_feature 1..18: note = Description of Artificial Sequence: Synthetic Antisense oligonucleotide
  modified_base 9: mod_base = OTHER; note = 5-methyl
  modified_base 13..14: mod_base = OTHER; note = 5-methyl
  modified_base 18: mod_base = OTHER; note = 5-methyl
  source 1..18: mol_type = other RNA
ggtaagttctgtccaagc

SEQ ID NO: 16396 - RNA, 20 nt, synthetic construct
  misc_feature 1..20: note = Description of Artificial Sequence: Synthetic Antisense oligonucleotide
  modified_base 2: mod_base = OTHER; note = 5-methyl
  modified_base 14: mod_base = OTHER; note = 5-methyl
  modified_base 19: mod_base = OTHER; note = 5-methyl
  source 1..20: mol_type = other RNA
tcaaggaagatggcatttct

SEQ ID NO: 16397 - RNA, 18 nt, synthetic construct
  misc_feature 1..18: note = Description of Artificial Sequence: Synthetic Antisense oligonucleotide
  modified_base 9: mod_base = OTHER; note = 5-methyl
  modified_base 13..14: mod_base = OTHER; note = 5-methyl
  modified_base 18: mod_base = OTHER; note = 5-methyl
  source 1..18: mol_type = other RNA
ggtaagttctgtccaagc

SEQ ID NO: 16398 - RNA, 22 nt, synthetic construct
  misc_feature 1..22: note = Description of Artificial Sequence: Synthetic Antisense oligonucleotide
  modified_base 2: mod_base = OTHER; note = 5-methyl
  modified_base 14: mod_base = OTHER; note = 5-methyl
  modified_base 19: mod_base = OTHER; note = 5-methyl
  source 1..22: mol_type = other RNA
tcaaggaagatggcatttctag

SEQ ID NO: 16399 - RNA, 18 nt, synthetic construct
  misc_feature 1..18: note = Description of Artificial Sequence: Synthetic Antisense oligonucleotide
  modified_base 9: mod_base = OTHER; note = 5-methyl
  modified_base 13..14: mod_base = OTHER; note = 5-methyl
  modified_base 18: mod_base = OTHER; note = 5-methyl
  source 1..18: mol_type = other RNA
ggtaagttctgtccaagc

SEQ ID NO: 16400 - RNA, 22 nt, synthetic construct
  misc_feature 1..22: note = Description of Artificial Sequence: Synthetic Antisense oligonucleotide
  modified_base 2: mod_base = OTHER; note = 5-methyl
  modified_base 14: mod_base = OTHER; note = 5-methyl
  modified_base 19: mod_base = OTHER; note = 5-methyl
  source 1..22: mol_type = other RNA
tcaaggaagatggcatttctag

SEQ ID NO: 16401 - RNA, 18 nt, synthetic construct
  misc_feature 1..18: note = Description of Artificial Sequence: Synthetic Antisense oligonucleotide
  modified_base 9: mod_base = OTHER; note = 5-methyl
  modified_base 13..14: mod_base = OTHER; note = 5-methyl
  modified_base 18: mod_base = OTHER; note = 5-methyl
  source 1..18: mol_type = other RNA
ggtaagttctgtccaagc

SEQ ID NO: 16402 - RNA, 20 nt, synthetic construct
  misc_feature 1..20: note = Description of Artificial Sequence: Synthetic Antisense oligonucleotide
  modified_base 2: mod_base = OTHER; note = 5-methyl
  modified_base 14: mod_base = OTHER; note = 5-methyl
  modified_base 19: mod_base = OTHER; note = 5-methyl
  source 1..20: mol_type = other RNA
tcaaggaagatggcatttct

SEQ ID NO: 16403 - RNA, 18 nt, synthetic construct
  misc_feature 1..18: note = Description of Artificial Sequence: Synthetic Antisense oligonucleotide
  modified_base 8: mod_base = OTHER; note = 5-methyl
  modified_base 12..13: mod_base = OTHER; note = 5-methyl
  modified_base 17..18: mod_base = OTHER; note = 5-methyl
  source 1..18: mol_type = other RNA
gtaagttctgtccaagcc

SEQ ID NO: 16404 - RNA, 20 nt, synthetic construct
  misc_feature 1..20: note = Description of Artificial Sequence: Synthetic Antisense oligonucleotide
  modified_base 2: mod_base = OTHER; note = 5-methyl
  modified_base 14: mod_base = OTHER; note = 5-methyl
  modified_base 19: mod_base = OTHER; note = 5-methyl
  source 1..20: mol_type = other RNA
tcaaggaagatggcatttct

SEQ ID NO: 16405 - RNA, 18 nt, synthetic construct
  misc_feature 1..18: note = Description of Artificial Sequence: Synthetic Antisense oligonucleotide
  modified_base 8: mod_base = OTHER; note = 5-methyl
  modified_base 12..13: mod_base = OTHER; note = 5-methyl
  modified_base 17..18: mod_base = OTHER; note = 5-methyl
  source 1..18: mol_type = other RNA
gtaagttctgtccaagcc

SEQ ID NO: 16406 - RNA, 22 nt, synthetic construct
  misc_feature 1..22: note = Description of Artificial Sequence: Synthetic Antisense oligonucleotide
  modified_base 2: mod_base = OTHER; note = 5-methyl
  modified_base 14: mod_base = OTHER; note = 5-methyl
  modified_base 19: mod_base = OTHER; note = 5-methyl
  source 1..22: mol_type = other RNA
tcaaggaagatggcatttctag

SEQ ID NO: 16407 - RNA, 18 nt, synthetic construct
  misc_feature 1..18: note = Description of Artificial Sequence: Synthetic Antisense oligonucleotide
  modified_base 8: mod_base = OTHER; note = 5-methyl
  modified_base 12..13: mod_base = OTHER; note = 5-methyl
  modified_base 17..18: mod_base = OTHER; note = 5-methyl
  source 1..18: mol_type = other RNA
gtaagttctgtccaagcc

SEQ ID NO: 16408 - RNA, 22 nt, synthetic construct
  misc_feature 1..22: note = Description of Artificial Sequence: Synthetic Antisense oligonucleotide
  modified_base 2: mod_base = OTHER; note = 5-methyl
  modified_base 14: mod_base = OTHER; note = 5-methyl
  modified_base 19: mod_base = OTHER; note = 5-methyl
  source 1..22: mol_type = other RNA
tcaaggaagatggcatttctag

SEQ ID NO: 16409 - RNA, 18 nt, synthetic construct
  misc_feature 1..18: note = Description of Artificial Sequence: Synthetic Antisense oligonucleotide
  modified_base 8: mod_base = OTHER; note = 5-methyl
  modified_base 12..13: mod_base = OTHER; note = 5-methyl
  modified_base 17..18: mod_base = OTHER; note = 5-methyl
  source 1..18: mol_type = other RNA
gtaagttctgtccaagcc

SEQ ID NO: 16410 - RNA, 20 nt, synthetic construct
  misc_feature 1..20: note = Description of Artificial Sequence: Synthetic Antisense oligonucleotide
  modified_base 2: mod_base = OTHER; note = 5-methyl
  modified_base 14: mod_base = OTHER; note = 5-methyl
  modified_base 19: mod_base = OTHER; note = 5-methyl
  source 1..20: mol_type = other RNA
tcaaggaagatggcatttct

SEQ ID NO: 16411 - RNA, 18 nt, synthetic construct
  misc_feature 1..18: note = Description of Artificial Sequence: Synthetic Antisense oligonucleotide
  modified_base 4: mod_base = OTHER; note = 5-methyl
  modified_base 13: mod_base = OTHER; note = 5-methyl
  modified_base 17..18: mod_base = OTHER; note = 5-methyl
  source 1..18: mol_type = other RNA
agtcggtaagttctgtcc

SEQ ID NO: 16412 - RNA, 20 nt, synthetic construct
  misc_feature 1..20: note = Description of Artificial Sequence: Synthetic Antisense oligonucleotide
  modified_base 2: mod_base = OTHER; note = 5-methyl
  modified_base 14: mod_base = OTHER; note = 5-methyl
  modified_base 19: mod_base = OTHER; note = 5-methyl
  source 1..20: mol_type = other RNA
tcaaggaagatggcatttct

SEQ ID NO: 16413 - RNA, 18 nt, synthetic construct
  misc_feature 1..18: note = Description of Artificial Sequence: Synthetic Antisense oligonucleotide
  modified_base 4: mod_base = OTHER; note = 5-methyl
  modified_base 13: mod_base = OTHER; note = 5-methyl
  modified_base 17..18: mod_base = OTHER; note = 5-methyl
  source 1..18: mol_type = other RNA
agtcggtaagttctgtcc

SEQ ID NO: 16414 - RNA, 22 nt, synthetic construct
  misc_feature 1..22: note = Description of Artificial Sequence: Synthetic Antisense oligonucleotide
  modified_base 2: mod_base = OTHER; note = 5-methyl
  modified_base 14: mod_base = OTHER; note = 5-methyl
  modified_base 19: mod_base = OTHER; note = 5-methyl
  source 1..22: mol_type = other RNA
tcaaggaagatggcatttctag

SEQ ID NO: 16415 - RNA, 18 nt, synthetic construct
  misc_feature 1..18: note = Description of Artificial Sequence: Synthetic Antisense oligonucleotide
  modified_base 4: mod_base = OTHER; note = 5-methyl
  modified_base 13: mod_base = OTHER; note = 5-methyl
  modified_base 17..18: mod_base = OTHER; note = 5-methyl
  source 1..18: mol_type = other RNA
agtcggtaagttctgtcc

SEQ ID NO: 16416 - RNA, 22 nt, synthetic construct
  misc_feature 1..22: note = Description of Artificial Sequence: Synthetic Antisense oligonucleotide
  modified_base 2: mod_base = OTHER; note = 5-methyl
  modified_base 14: mod_base = OTHER; note = 5-methyl
  modified_base 19: mod_base = OTHER; note = 5-methyl
  source 1..22: mol_type = other RNA
tcaaggaagatggcatttctag

SEQ ID NO: 16417 - RNA, 18 nt, synthetic construct
  misc_feature 1..18: note = Description of Artificial Sequence: Synthetic Antisense oligonucleotide
  modified_base 4: mod_base = OTHER; note = 5-methyl
  modified_base 13: mod_base = OTHER; note = 5-methyl
  modified_base 17..18: mod_base = OTHER; note = 5-methyl
  source 1..18: mol_type = other RNA
agtcggtaagttctgtcc

SEQ ID NO: 16418 - RNA, 20 nt, synthetic construct
  misc_feature 1..20: note = Description of Artificial Sequence: Synthetic Antisense oligonucleotide
  modified_base 2: mod_base = OTHER; note = 5-methyl
  modified_base 14: mod_base = OTHER; note = 5-methyl
  modified_base 19: mod_base = OTHER; note = 5-methyl
  source 1..20: mol_type = other RNA
tcaaggaagatggcatttct

SEQ ID NO: 16419 - RNA, 18 nt, synthetic construct
  misc_feature 1..18: note = Description of Artificial Sequence: Synthetic Antisense oligonucleotide
  modified_base 1: mod_base = OTHER; note = 5-methyl
  modified_base 5..6: mod_base = OTHER; note = 5-methyl
  modified_base 10..12: mod_base = OTHER; note = 5-methyl
  source 1..18: mol_type = other RNA
ctgtccaagcccggttga

SEQ ID NO: 16420 - RNA, 20 nt, synthetic construct
  misc_feature 1..20: note = Description of Artificial Sequence: Synthetic Antisense oligonucleotide
  modified_base 2: mod_base = OTHER; note = 5-methyl
  modified_base 14: mod_base = OTHER; note = 5-methyl
  modified_base 19: mod_base = OTHER; note = 5-methyl
  source 1..20: mol_type = other RNA
tcaaggaagatggcatttct

SEQ ID NO: 16421 - RNA, 18 nt, synthetic construct
  misc_feature 1..18: note = Description of Artificial Sequence: Synthetic Antisense oligonucleotide
  modified_base 1: mod_base = OTHER; note = 5-methyl
  modified_base 5..6: mod_base = OTHER; note = 5-methyl
  modified_base 10..12: mod_base = OTHER; note = 5-methyl
  source 1..18: mol_type = other RNA
ctgtccaagcccggttga

SEQ ID NO: 16422 - RNA, 22 nt, synthetic construct
  misc_feature 1..22: note = Description of Artificial Sequence: Synthetic Antisense oligonucleotide
  modified_base 2: mod_base = OTHER; note = 5-methyl
  modified_base 14: mod_base = OTHER; note = 5-methyl
  modified_base 19: mod_base = OTHER; note = 5-methyl
  source 1..22: mol_type = other RNA
tcaaggaagatggcatttctag

SEQ ID NO: 16423 - RNA, 18 nt, synthetic construct
  misc_feature 1..18: note = Description of Artificial Sequence: Synthetic Antisense oligonucleotide
  modified_base 1: mod_base = OTHER; note = 5-methyl
  modified_base 5..6: mod_base = OTHER; note = 5-methyl
  modified_base 10..12: mod_base = OTHER; note = 5-methyl
  source 1..18: mol_type = other RNA
ctgtccaagcccggttga

SEQ ID NO: 16424 - RNA, 22 nt, synthetic construct
  misc_feature 1..22: note = Description of Artificial Sequence: Synthetic Antisense oligonucleotide
  modified_base 2: mod_base = OTHER; note = 5-methyl
  modified_base 14: mod_base = OTHER; note = 5-methyl
  modified_base 19: mod_base = OTHER; note = 5-methyl
  source 1..22: mol_type = other RNA
tcaaggaagatggcatttctag

SEQ ID NO: 16425 - RNA, 18 nt, synthetic construct
  misc_feature 1..18: note = Description of Artificial Sequence: Synthetic Antisense oligonucleotide
  modified_base 1: mod_base = OTHER; note = 5-methyl
  modified_base 5..6: mod_base = OTHER; note = 5-methyl
  modified_base 10..12: mod_base = OTHER; note = 5-methyl
  source 1..18: mol_type = other RNA
ctgtccaagcccggttga

SEQ ID NO: 16426 - RNA, 16 nt, synthetic construct
  misc_feature 1..16: note = Description of Artificial Sequence: Synthetic Antisense oligonucleotide
  modified_base 2: mod_base = OTHER; note = 5-methyl
  modified_base 14: mod_base = OTHER; note = 5-methyl
  source 1..16: mol_type = other RNA
tcaaggaagatggcat

SEQ ID NO: 16427 - RNA, 15 nt, synthetic construct
  misc_feature 1..15: note = Description of Artificial Sequence: Synthetic Antisense oligonucleotide
  modified_base 7: mod_base = OTHER; note = 5-methyl
  modified_base 11..12: mod_base = OTHER; note = 5-methyl
  source 1..15: mol_type = other RNA
taagttctgtccaag

SEQ ID NO: 16428 - RNA, 16 nt, synthetic construct
  misc_feature 1..16: note = Description of Artificial Sequence: Synthetic Antisense oligonucleotide
  modified_base 2: mod_base = OTHER; note = 5-methyl
  modified_base 14: mod_base = OTHER; note = 5-methyl
  source 1..16: mol_type = other RNA
tcaaggaagatggcat

SEQ ID NO: 16429 - RNA, 15 nt, synthetic construct
  misc_feature 1..15: note = Description of Artificial Sequence: Synthetic Antisense oligonucleotide
  modified_base 7: mod_base = OTHER; note = 5-methyl
  modified_base 11..12: mod_base = OTHER; note = 5-methyl
  source 1..15: mol_type = other RNA
taagttctgtccaag

SEQ ID NO: 16430 - RNA, 15 nt, synthetic construct
  misc_feature 1..15: note = Description of Artificial Sequence: Synthetic Antisense oligonucleotide
  modified_base 9: mod_base = OTHER; note = 5-methyl
  modified_base 14: mod_base = OTHER; note = 5-methyl
  source 1..15: mol_type = other RNA
gaagatggcatttct

SEQ ID NO: 16431 - RNA, 15 nt, synthetic construct
  misc_feature 1..15: note = Description of Artificial Sequence: Synthetic Antisense oligonucleotide
  modified_base 7: mod_base = OTHER; note = 5-methyl
  modified_base 11..12: mod_base = OTHER; note = 5-methyl
  source 1..15: mol_type = other RNA
taagttctgtccaag

SEQ ID NO: 16432 - RNA, 15 nt, synthetic construct
  misc_feature 1..15: note = Description of Artificial Sequence: Synthetic Antisense oligonucleotide
  modified_base 9: mod_base = OTHER; note = 5-methyl
  modified_base 14: mod_base = OTHER; note = 5-methyl
  source 1..15: mol_type = other RNA
gaagatggcatttct

SEQ ID NO: 16433 - RNA, 15 nt, synthetic construct
  misc_feature 1..15: note = Description of Artificial Sequence: Synthetic Antisense oligonucleotide
  modified_base 7: mod_base = OTHER; note = 5-methyl
  modified_base 11..12: mod_base = OTHER; note = 5-methyl
  source 1..15: mol_type = other RNA
taagttctgtccaag

SEQ ID NO: 16434 - DNA, 20 bp, synthetic construct
  misc_feature 1..20: note = Description of Artificial Sequence: Synthetic Antisense oligonucleotide
  source 1..20: mol_type = other DNA
tcaaggaagatggcatttct

SEQ ID NO: 16435 - DNA, 18 bp, synthetic construct
  misc_feature 1..18: note = Description of Artificial Sequence: Synthetic Antisense oligonucleotide
  source 1..18: mol_type = other DNA
ggtaagttctgtccaagc

SEQ ID NO: 16436 - DNA, 20 bp, synthetic construct
  misc_feature 1..20: note = Description of Artificial Sequence: Synthetic Antisense oligonucleotide
  source 1..20: mol_type = other DNA
tcaaggaagatggcatttct

SEQ ID NO: 16437 - DNA, 18 bp, synthetic construct
  misc_feature 1..18: note = Description of Artificial Sequence: Synthetic Antisense oligonucleotide
  source 1..18: mol_type = other DNA
ggtaagttctgtccaagc

SEQ ID NO: 16438 - DNA, 22 bp, synthetic construct
  misc_feature 1..22: note = Description of Artificial Sequence: Synthetic Antisense oligonucleotide
  source 1..22: mol_type = other DNA
tcaaggaagatggcatttctag

SEQ ID NO: 16439 - DNA, 18 bp, synthetic construct
  misc_feature 1..18: note = Description of Artificial Sequence: Synthetic Antisense oligonucleotide
  source 1..18: mol_type = other DNA
ggtaagttctgtccaagc

SEQ ID NO: 16440 - DNA, 22 bp, synthetic construct
  misc_feature 1..22: note = Description of Artificial Sequence: Synthetic Antisense oligonucleotide
  source 1..22: mol_type = other DNA
tcaaggaagatggcatttctag

SEQ ID NO: 16441 - DNA, 18 bp, synthetic construct
  misc_feature 1..18: note = Description of Artificial Sequence: Synthetic Antisense oligonucleotide
  source 1..18: mol_type = other DNA
ggtaagttctgtccaagc

SEQ ID NO: 16442 - DNA, 20 bp, synthetic construct
  misc_feature 1..20: note = Description of Artificial Sequence: Synthetic Antisense oligonucleotide
  source 1..20: mol_type = other DNA
tcaaggaagatggcatttct

SEQ ID NO: 16443 - DNA, 18 bp, synthetic construct
  misc_feature 1..18: note = Description of Artificial Sequence: Synthetic Antisense oligonucleotide
  source 1..18: mol_type = other DNA
gtaagttctgtccaagcc

SEQ ID NO: 16444 - DNA, 20 bp, synthetic construct
  misc_feature 1..20: note = Description of Artificial Sequence: Synthetic Antisense oligonucleotide
  source 1..20: mol_type = other DNA
tcaaggaagatggcatttct

SEQ ID NO: 16445 - DNA, 18 bp, synthetic construct
  misc_feature 1..18: note = Description of Artificial Sequence: Synthetic Antisense oligonucleotide
  source 1..18: mol_type = other DNA
gtaagttctgtccaagcc

SEQ ID NO: 16446 - DNA, 22 bp, synthetic construct
  misc_feature 1..22: note = Description of Artificial Sequence: Synthetic Antisense oligonucleotide
  source 1..22: mol_type = other DNA
tcaaggaagatggcatttctag

SEQ ID NO: 16447 - DNA, 18 bp, synthetic construct
  misc_feature 1..18: note = Description of Artificial Sequence: Synthetic Antisense oligonucleotide
  source 1..18: mol_type = other DNA
gtaagttctgtccaagcc

SEQ ID NO: 16448 - DNA, 22 bp, synthetic construct
  misc_feature 1..22: note = Description of Artificial Sequence: Synthetic Antisense oligonucleotide
  source 1..22: mol_type = other DNA
tcaaggaagatggcatttctag

SEQ ID NO: 16449 - DNA, 18 bp, synthetic construct
  misc_feature 1..18: note = Description of Artificial Sequence: Synthetic Antisense oligonucleotide
  source 1..18: mol_type = other DNA
gtaagttctgtccaagcc

SEQ ID NO: 16450 - DNA, 20 bp, synthetic construct
  misc_feature 1..20: note = Description of Artificial Sequence: Synthetic Antisense oligonucleotide
  source 1..20: mol_type = other DNA
tcaaggaagatggcatttct

SEQ ID NO: 16451 - DNA, 18 bp, synthetic construct
  misc_feature 1..18: note = Description of Artificial Sequence: Synthetic Antisense oligonucleotide
  source 1..18: mol_type = other DNA
agtcggtaagttctgtcc

SEQ ID NO: 16452 - DNA, 20 bp, synthetic construct
  misc_feature 1..20: note = Description of Artificial Sequence: Synthetic Antisense oligonucleotide
  source 1..20: mol_type = other DNA
tcaaggaagatggcatttct

SEQ ID NO: 16453 - DNA, 18 bp, synthetic construct
  misc_feature 1..18: note = Description of Artificial Sequence: Synthetic Antisense oligonucleotide
  source 1..18: mol_type = other DNA
agtcggtaagttctgtcc

SEQ ID NO: 16454 - DNA, 22 bp, synthetic construct
  misc_feature 1..22: note = Description of Artificial Sequence: Synthetic Antisense oligonucleotide
  source 1..22: mol_type = other DNA
tcaaggaagatggcatttctag

SEQ ID NO: 16455 - DNA, 18 bp, synthetic construct
  misc_feature 1..18: note = Description of Artificial Sequence: Synthetic Antisense oligonucleotide
  source 1..18: mol_type = other DNA
agtcggtaagttctgtcc

SEQ ID NO: 16456 - DNA, 22 bp, synthetic construct
  misc_feature 1..22: note = Description of Artificial Sequence: Synthetic Antisense oligonucleotide
  source 1..22: mol_type = other DNA
tcaaggaagatggcatttctag

SEQ ID NO: 16457 - DNA, 18 bp, synthetic construct
  misc_feature 1..18: note = Description of Artificial Sequence: Synthetic Antisense oligonucleotide
  source 1..18: mol_type = other DNA
agtcggtaagttctgtcc

SEQ ID NO: 16458 - DNA, 20 bp, synthetic construct
  misc_feature 1..20: note = Description of Artificial Sequence: Synthetic Antisense oligonucleotide
  source 1..20: mol_type = other DNA
tcaaggaagatggcatttct

SEQ ID NO: 16459 - DNA, 18 bp, synthetic construct
  misc_feature 1..18: note = Description of Artificial Sequence: Synthetic Antisense oligonucleotide
  source 1..18: mol_type = other DNA
ctgtccaagcccggttga

SEQ ID NO: 16460 - DNA, 20 bp, synthetic construct
  misc_feature 1..20: note = Description of Artificial Sequence: Synthetic Antisense oligonucleotide
  source 1..20: mol_type = other DNA
tcaaggaagatggcatttct

SEQ ID NO: 16461 - DNA, 18 bp, synthetic construct
  misc_feature 1..18: note = Description of Artificial Sequence: Synthetic Antisense oligonucleotide
  source 1..18: mol_type = other DNA
ctgtccaagcccggttga

SEQ ID NO: 16462 - DNA, 22 bp, synthetic construct
  misc_feature 1..22: note = Description of Artificial Sequence: Synthetic Antisense oligonucleotide
  source 1..22: mol_type = other DNA
tcaaggaagatggcatttctag

SEQ ID NO: 16463 - DNA, 18 bp, synthetic construct
  misc_feature 1..18: note = Description of Artificial Sequence: Synthetic Antisense oligonucleotide
  source 1..18: mol_type = other DNA
ctgtccaagcccggttga

SEQ ID NO: 16464 - DNA, 22 bp, synthetic construct
  misc_feature 1..22: note = Description of Artificial Sequence: Synthetic Antisense oligonucleotide
  source 1..22: mol_type = other DNA
tcaaggaagatggcatttctag

SEQ ID NO: 16465 - DNA, 18 bp, synthetic construct
  misc_feature 1..18: note = Description of Artificial Sequence: Synthetic Antisense oligonucleotide
  source 1..18: mol_type = other DNA
ctgtccaagcccggttga

SEQ ID NO: 16466 - DNA, 16 bp, synthetic construct
  misc_feature 1..16: note = Description of Artificial Sequence: Synthetic Antisense oligonucleotide
  source 1..16: mol_type = other DNA
tcaaggaagatggcat

SEQ ID NO: 16467 - DNA, 15 bp, synthetic construct
  misc_feature 1..15: note = Description of Artificial Sequence: Synthetic Antisense oligonucleotide
  source 1..15: mol_type = other DNA
taagttctgtccaag

SEQ ID NO: 16468 - DNA, 16 bp, synthetic construct
  misc_feature 1..16: note = Description of Artificial Sequence: Synthetic Antisense oligonucleotide
  source 1..16: mol_type = other DNA
tcaaggaagatggcat

SEQ ID NO: 16469 - DNA, 15 bp, synthetic construct
  misc_feature 1..15: note = Description of Artificial Sequence: Synthetic Antisense oligonucleotide
  source 1..15: mol_type = other DNA
taagttctgtccaag

SEQ ID NO: 16470 - DNA, 15 bp, synthetic construct
  misc_feature 1..15: note = Description of Artificial Sequence: Synthetic Antisense oligonucleotide
  source 1..15: mol_type = other DNA
gaagatggcatttct

SEQ ID NO: 16471 - DNA, 15 bp, synthetic construct
  misc_feature 1..15: note = Description of Artificial Sequence: Synthetic Antisense oligonucleotide
  source 1..15: mol_type = other DNA
taagttctgtccaag

SEQ ID NO: 16472 - DNA, 15 bp, synthetic construct
  misc_feature 1..15: note = Description of Artificial Sequence: Synthetic Antisense oligonucleotide
  source 1..15: mol_type = other DNA
gaagatggcatttct

SEQ ID NO: 16473 - DNA, 15 bp, synthetic construct
  misc_feature 1..15: note = Description of Artificial Sequence: Synthetic Antisense oligonucleotide
  source 1..15: mol_type = other DNA
taagttctgtccaag

SEQ ID NO: 16474 - DNA, 20 bp, synthetic construct
  misc_feature 1..20: note = Description of Artificial Sequence: Synthetic Antisense oligonucleotide
  modified_base 2: mod_base = OTHER; note = 5-methyl
  modified_base 14: mod_base = OTHER; note = 5-methyl
  modified_base 19: mod_base = OTHER; note = 5-methyl
  source 1..20: mol_type = other DNA
tcaaggaagatggcatttct

SEQ ID NO: 16475 - DNA, 18 bp, synthetic construct
  misc_feature 1..18: note = Description of Artificial Sequence: Synthetic Antisense oligonucleotide
  modified_base 9: mod_base = OTHER; note = 5-methyl
  modified_base 13..14: mod_base = OTHER; note = 5-methyl
  modified_base 18: mod_base = OTHER; note = 5-methyl
  source 1..18: mol_type = other DNA
ggtaagttctgtccaagc

SEQ ID NO: 16476 - DNA, 20 bp, synthetic construct
  misc_feature 1..20: note = Description of Artificial Sequence: Synthetic Antisense oligonucleotide
  modified_base 2: mod_base = OTHER; note = 5-methyl
  modified_base 14: mod_base = OTHER; note = 5-methyl
  modified_base 19: mod_base = OTHER; note = 5-methyl
  source 1..20: mol_type = other DNA
tcaaggaagatggcatttct

SEQ ID NO: 16477 - DNA, 18 bp, synthetic construct
  misc_feature 1..18: note = Description of Artificial Sequence: Synthetic Antisense oligonucleotide
  modified_base 9: mod_base = OTHER; note = 5-methyl
  modified_base 13..14: mod_base = OTHER; note = 5-methyl
  modified_base 18: mod_base = OTHER; note = 5-methyl
  source 1..18: mol_type = other DNA
ggtaagttctgtccaagc

SEQ ID NO: 16478 - DNA, 22 bp, synthetic construct
  misc_feature 1..22: note = Description of Artificial Sequence: Synthetic Antisense oligonucleotide
  modified_base 2: mod_base = OTHER; note = 5-methyl
  modified_base 14: mod_base = OTHER; note = 5-methyl
  modified_base 19: mod_base = OTHER; note = 5-methyl
  source 1..22: mol_type = other DNA
tcaaggaagatggcatttctag

SEQ ID NO: 16479 - DNA, 18 bp, synthetic construct
  misc_feature 1..18: note = Description of Artificial Sequence: Synthetic Antisense oligonucleotide
  modified_base 9: mod_base = OTHER; note = 5-methyl
  modified_base 13..14: mod_base = OTHER; note = 5-methyl
  modified_base 18: mod_base = OTHER; note = 5-methyl
  source 1..18: mol_type = other DNA
ggtaagttctgtccaagc

SEQ ID NO: 16480 - DNA, 22 bp, synthetic construct
  misc_feature 1..22: note = Description of Artificial Sequence: Synthetic Antisense oligonucleotide
  modified_base 2: mod_base = OTHER; note = 5-methyl
  modified_base 14: mod_base = OTHER; note = 5-methyl
  modified_base 19: mod_base = OTHER; note = 5-methyl
  source 1..22: mol_type = other DNA
tcaaggaagatggcatttctag

SEQ ID NO: 16481 - DNA, 18 bp, synthetic construct
  misc_feature 1..18: note = Description of Artificial Sequence: Synthetic Antisense oligonucleotide
  modified_base 9: mod_base = OTHER; note = 5-methyl
  modified_base 13..14: mod_base = OTHER; note = 5-methyl
  modified_base 18: mod_base = OTHER; note = 5-methyl
  source 1..18: mol_type = other DNA
ggtaagttctgtccaagc

SEQ ID NO: 16482 - DNA, 20 bp, synthetic construct
  misc_feature 1..20: note = Description of Artificial Sequence: Synthetic Antisense oligonucleotide
  modified_base 2: mod_base = OTHER; note = 5-methyl
  modified_base 14: mod_base = OTHER; note = 5-methyl
  modified_base 19: mod_base = OTHER; note = 5-methyl
  source 1..20: mol_type = other DNA
tcaaggaagatggcatttct

SEQ ID NO: 16483 - DNA, 18 bp, synthetic construct
  misc_feature 1..18: note = Description of Artificial Sequence: Synthetic Antisense oligonucleotide
  modified_base 8: mod_base = OTHER; note = 5-methyl
  modified_base 12..13: mod_base = OTHER; note = 5-methyl
  modified_base 17..18: mod_base = OTHER; note = 5-methyl
  source 1..18: mol_type = other DNA
gtaagttctgtccaagcc

SEQ ID NO: 16484 - DNA, 20 bp, synthetic construct
  misc_feature 1..20: note = Description of Artificial Sequence: Synthetic Antisense oligonucleotide
  modified_base 2: mod_base = OTHER; note = 5-methyl
  modified_base 14: mod_base = OTHER; note = 5-methyl
  modified_base 19: mod_base = OTHER; note = 5-methyl
  source 1..20: mol_type = other DNA
tcaaggaagatggcatttct

SEQ ID NO: 16485 - DNA, 18 bp, synthetic construct
  misc_feature 1..18: note = Description of Artificial Sequence: Synthetic Antisense oligonucleotide
  modified_base 8: mod_base = OTHER; note = 5-methyl
  modified_base 12..13: mod_base = OTHER; note = 5-methyl
  modified_base 17..18: mod_base = OTHER; note = 5-methyl
  source 1..18: mol_type = other DNA
gtaagttctgtccaagcc

SEQ ID NO: 16486 - DNA, 22 bp, synthetic construct
  misc_feature 1..22: note = Description of Artificial Sequence: Synthetic Antisense oligonucleotide
  modified_base 2: mod_base = OTHER; note = 5-methyl
  modified_base 14: mod_base = OTHER; note = 5-methyl
  modified_base 19: mod_base = OTHER; note = 5-methyl
  source 1..22: mol_type = other DNA
tcaaggaagatggcatttctag

SEQ ID NO: 16487 - DNA, 18 bp, synthetic construct
  misc_feature 1..18: note = Description of Artificial Sequence: Synthetic Antisense oligonucleotide
  modified_base 8: mod_base = OTHER; note = 5-methyl
  modified_base 12..13: mod_base = OTHER; note = 5-methyl
  modified_base 17..18: mod_base = OTHER; note = 5-methyl
  source 1..18: mol_type = other DNA
gtaagttctgtccaagcc

SEQ ID NO: 16488 - DNA, 22 bp, synthetic construct
  misc_feature 1..22: note = Description of Artificial Sequence: Synthetic Antisense oligonucleotide
  modified_base 2: mod_base = OTHER; note = 5-methyl
  modified_base 14: mod_base = OTHER; note = 5-methyl
  modified_base 19: mod_base = OTHER; note = 5-methyl
  source 1..22: mol_type = other DNA
tcaaggaagatggcatttctag

SEQ ID NO: 16489 - DNA, 18 bp, synthetic construct
  misc_feature 1..18: note = Description of Artificial Sequence: Synthetic Antisense oligonucleotide
  modified_base 8: mod_base = OTHER; note = 5-methyl
  modified_base 12..13: mod_base = OTHER; note = 5-methyl
  modified_base 17..18: mod_base = OTHER; note = 5-methyl
  source 1..18: mol_type = other DNA
gtaagttctgtccaagcc

SEQ ID NO: 16490 - DNA, 20 bp, synthetic construct
  misc_feature 1..20: note = Description of Artificial Sequence: Synthetic Antisense oligonucleotide
  modified_base 2: mod_base = OTHER; note = 5-methyl
  modified_base 14: mod_base = OTHER; note = 5-methyl
  modified_base 19: mod_base = OTHER; note = 5-methyl
  source 1..20: mol_type = other DNA
tcaaggaagatggcatttct

SEQ ID NO: 16491 - DNA, 18 bp, synthetic construct
  misc_feature 1..18: note = Description of Artificial Sequence: Synthetic Antisense oligonucleotide
  modified_base 4: mod_base = OTHER; note = 5-methyl
  modified_base 13: mod_base = OTHER; note = 5-methyl
  modified_base 17..18: mod_base = OTHER; note = 5-methyl
  source 1..18: mol_type = other DNA
agtcggtaagttctgtcc

SEQ ID NO: 16492 - DNA, 20 bp, synthetic construct
  misc_feature 1..20: note = Description of Artificial Sequence: Synthetic Antisense oligonucleotide
  modified_base 2: mod_base = OTHER; note = 5-methyl
  modified_base 14: mod_base = OTHER; note = 5-methyl
  modified_base 19: mod_base = OTHER; note = 5-methyl
  source 1..20: mol_type = other DNA
tcaaggaagatggcatttct

SEQ ID NO: 16493 - DNA, 18 bp, synthetic construct
  misc_feature 1..18: note = Description of Artificial Sequence: Synthetic Antisense oligonucleotide
  modified_base 4: mod_base = OTHER; note = 5-methyl
  modified_base 13: mod_base = OTHER; note = 5-methyl
  modified_base 17..18: mod_base = OTHER; note = 5-methyl
  source 1..18: mol_type = other DNA
agtcggtaagttctgtcc

SEQ ID NO: 16494 - DNA, 22 bp, synthetic construct
  misc_feature 1..22: note = Description of Artificial Sequence: Synthetic Antisense oligonucleotide
  modified_base 2: mod_base = OTHER; note = 5-methyl
  modified_base 14: mod_base = OTHER; note = 5-methyl
  modified_base 19: mod_base = OTHER; note = 5-methyl
  source 1..22: mol_type = other DNA
tcaaggaagatggcatttctag

SEQ ID NO: 16495 - DNA, 18 bp, synthetic construct
  misc_feature 1..18: note = Description of Artificial Sequence: Synthetic Antisense oligonucleotide
  modified_base 4: mod_base = OTHER; note = 5-methyl
  modified_base 13: mod_base = OTHER; note = 5-methyl
  modified_base 17..18: mod_base = OTHER; note = 5-methyl
  source 1..18: mol_type = other DNA
agtcggtaagttctgtcc

SEQ ID NO: 16496 - DNA, 22 bp, synthetic construct
  misc_feature 1..22: note = Description of Artificial Sequence: Synthetic Antisense oligonucleotide
  modified_base 2: mod_base = OTHER; note = 5-methyl
  modified_base 14: mod_base = OTHER; note = 5-methyl
  modified_base 19: mod_base = OTHER; note = 5-methyl
  source 1..22: mol_type = other DNA
tcaaggaagatggcatttctag

SEQ ID NO: 16497 - DNA, 18 bp, synthetic construct
  misc_feature 1..18: note = Description of Artificial Sequence: Synthetic Antisense oligonucleotide
  modified_base 4: mod_base = OTHER; note = 5-methyl
  modified_base 13: mod_base = OTHER; note = 5-methyl
  modified_base 17..18: mod_base = OTHER; note = 5-methyl
  source 1..18: mol_type = other DNA
agtcggtaagttctgtcc

SEQ ID NO: 16498 - DNA, 20 bp, synthetic construct
  misc_feature 1..20: note = Description of Artificial Sequence: Synthetic Antisense oligonucleotide
  modified_base 2: mod_base = OTHER; note = 5-methyl
  modified_base 14: mod_base = OTHER; note = 5-methyl
  modified_base 19: mod_base = OTHER; note = 5-methyl
  source 1..20: mol_type = other DNA
tcaaggaagatggcatttct

SEQ ID NO: 16499 - DNA, 18 bp, synthetic construct
  misc_feature 1..18: note = Description of Artificial Sequence: Synthetic Antisense oligonucleotide
  modified_base 1: mod_base = OTHER; note = 5-methyl
  modified_base 5..6: mod_base = OTHER; note = 5-methyl
  modified_base 10..12: mod_base = OTHER; note = 5-methyl
  source 1..18: mol_type = other DNA
ctgtccaagcccggttga

SEQ ID NO: 16500 - DNA, 20 bp, synthetic construct
  misc_feature 1..20: note = Description of Artificial Sequence: Synthetic Antisense oligonucleotide
  modified_base 2: mod_base = OTHER; note = 5-methyl
  modified_base 14: mod_base = OTHER; note = 5-methyl
  modified_base 19: mod_base = OTHER; note = 5-methyl
  source 1..20: mol_type = other DNA
tcaaggaagatggcatttct

SEQ ID NO: 16501 - DNA, 18 bp, synthetic construct
  misc_feature 1..18: note = Description of Artificial Sequence: Synthetic Antisense oligonucleotide
  modified_base 1: mod_base = OTHER; note = 5-methyl
  modified_base 5..6: mod_base = OTHER; note = 5-methyl
  modified_base 10..12: mod_base = OTHER; note = 5-methyl
  source 1..18: mol_type = other DNA
ctgtccaagcccggttga

SEQ ID NO: 16502 - DNA, 22 bp, synthetic construct
  misc_feature 1..22: note = Description of Artificial Sequence: Synthetic Antisense oligonucleotide
  modified_base 2: mod_base = OTHER; note = 5-methyl
  modified_base 14: mod_base = OTHER; note = 5-methyl
  modified_base 19: mod_base = OTHER; note = 5-methyl
  source 1..22: mol_type = other DNA
tcaaggaagatggcatttctag

SEQ ID NO: 16503 - DNA, 18 bp, synthetic construct
  misc_feature 1..18: note = Description of Artificial Sequence: Synthetic Antisense oligonucleotide
  modified_base 1: mod_base = OTHER; note = 5-methyl
  modified_base 5..6: mod_base = OTHER; note = 5-methyl
  modified_base 10..12: mod_base = OTHER; note = 5-methyl
  source 1..18: mol_type = other DNA
ctgtccaagcccggttga

SEQ ID NO: 16504 - DNA, 22 bp, synthetic construct
  misc_feature 1..22: note = Description of Artificial Sequence: Synthetic Antisense oligonucleotide
  modified_base 2: mod_base = OTHER; note = 5-methyl
  modified_base 14: mod_base = OTHER; note = 5-methyl
  modified_base 19: mod_base = OTHER; note = 5-methyl
  source 1..22: mol_type = other DNA
tcaaggaagatggcatttctag

SEQ ID NO: 16505 - DNA, 18 bp, synthetic construct
  misc_feature 1..18: note = Description of Artificial Sequence: Synthetic Antisense oligonucleotide
  modified_base 1: mod_base = OTHER; note = 5-methyl
  modified_base 5..6: mod_base = OTHER; note = 5-methyl
  modified_base 10..12: mod_base = OTHER; note = 5-methyl
  source 1..18: mol_type = other DNA
ctgtccaagcccggttga

SEQ ID NO: 16506 - DNA, 16 bp, synthetic construct
  misc_feature 1..16: note = Description of Artificial Sequence: Synthetic Antisense oligonucleotide
  modified_base 2: mod_base = OTHER; note = 5-methyl
  modified_base 14: mod_base = OTHER; note = 5-methyl
  source 1..16: mol_type = other DNA
tcaaggaagatggcat

SEQ ID NO: 16507 - DNA, 15 bp, synthetic construct
  misc_feature 1..15: note = Description of Artificial Sequence: Synthetic Antisense oligonucleotide
  modified_base 7: mod_base = OTHER; note = 5-methyl
  modified_base 11..12: mod_base = OTHER; note = 5-methyl
  source 1..15: mol_type = other DNA
taagttctgtccaag

SEQ ID NO: 16508 - DNA, 16 bp, synthetic construct
  misc_feature 1..16: note = Description of Artificial Sequence: Synthetic Antisense oligonucleotide
  modified_base 2: mod_base = OTHER; note = 5-methyl
  modified_base 14: mod_base = OTHER; note = 5-methyl
  source 1..16: mol_type = other DNA
tcaaggaagatggcat

SEQ ID NO: 16509 - DNA, 15 bp, synthetic construct
  misc_feature 1..15: note = Description of Artificial Sequence: Synthetic Antisense oligonucleotide
  modified_base 7: mod_base = OTHER; note = 5-methyl
  modified_base 11..12: mod_base = OTHER; note = 5-methyl
  source 1..15: mol_type = other DNA
taagttctgtccaag

SEQ ID NO: 16510 - DNA, 15 bp, synthetic construct
  misc_feature 1..15: note = Description of Artificial Sequence: Synthetic Antisense oligonucleotide
  modified_base 9: mod_base = OTHER; note = 5-methyl
  modified_base 14: mod_base = OTHER; note = 5-methyl
  source 1..15: mol_type = other DNA
gaagatggcatttct

SEQ ID NO: 16511 - DNA, 15 bp, synthetic construct
  misc_feature 1..15: note = Description of Artificial Sequence: Synthetic Antisense oligonucleotide
  modified_base 7: mod_base = OTHER; note = 5-methyl
  modified_base 11..12: mod_base = OTHER; note = 5-methyl
  source 1..15: mol_type = other DNA
taagttctgtccaag

SEQ ID NO: 16512 - DNA, 15 bp, synthetic construct
  misc_feature 1..15: note = Description of Artificial Sequence: Synthetic Antisense oligonucleotide
  modified_base 9: mod_base = OTHER; note = 5-methyl
  modified_base 14: mod_base = OTHER; note = 5-methyl
  source 1..15: mol_type = other DNA
gaagatggcatttct

SEQ ID NO: 16513 - DNA, 15 bp, synthetic construct
  misc_feature 1..15: note = Description of Artificial Sequence: Synthetic Antisense oligonucleotide
  modified_base 7: mod_base = OTHER; note = 5-methyl
  modified_base 11..12: mod_base = OTHER; note = 5-methyl
  source 1..15: mol_type = other DNA
taagttctgtccaag

SEQ ID NO: 16514 - DNA, 20 bp, synthetic construct
  misc_feature 1..20: note = Description of Artificial Sequence: Synthetic Antisense oligonucleotide
  misc_feature 1..20: note = Original Sequence: tcaaggaagauggcauuuct
  source 1..20: mol_type = other DNA
  modified_base 11: mod_base = OTHER; note = Uracil
  modified_base 16: mod_base = OTHER; note = Uracil
  modified_base 17: mod_base = OTHER; note = Uracil
  modified_base 18: mod_base = OTHER; note = Uracil
tcaaggaagatggcatttct

SEQ ID NO: 16515 - RNA, 18 nt, synthetic construct
  misc_feature 1..18: note = Description of Artificial Sequence: Synthetic Antisense oligonucleotide
  source 1..18: mol_type = other RNA
ggtaagttctgtccaagc

SEQ ID NO: 16516 - DNA, 20 bp, synthetic construct
  misc_feature 1..20: note = Description of Artificial Sequence: Synthetic Antisense oligonucleotide
  misc_feature 1..20: note = Original Sequence: tcaaggaagauggcauuuct
  source 1..20: mol_type = other DNA
  modified_base 11: mod_base = OTHER; note = Uracil
  modified_base 16: mod_base = OTHER; note = Uracil
  modified_base 17: mod_base = OTHER; note = Uracil
  modified_base 18: mod_base = OTHER; note = Uracil
tcaaggaagatggcatttct

SEQ ID NO: 16517 - RNA, 18 nt, synthetic construct
  misc_feature 1..18: note = Description of Artificial Sequence: Synthetic Antisense oligonucleotide
  source 1..18: mol_type = other RNA
ggtaagttctgtccaagc

SEQ ID NO: 16518 - DNA, 15 bp, synthetic construct
  misc_feature 1..15: note = Description of Artificial Sequence: Synthetic Antisense oligonucleotide
  source 1..15: mol_type = other DNA
gaagatggcatttct

SEQ ID NO: 16519 - DNA, 15 bp, synthetic construct
  misc_feature 1..15: note = Description of Artificial Sequence: Synthetic Antisense oligonucleotide
  source 1..15: mol_type = other DNA
taagttctgtccaag

SEQ ID NO: 16520 - DNA, 15 bp, synthetic construct
  misc_feature 1..15: note = Description of Artificial Sequence: Synthetic Antisense oligonucleotide
  source 1..15: mol_type = other DNA
gaagatggcatttct

SEQ ID NO: 16521 - DNA, 15 bp, synthetic construct
  misc_feature 1..15: note = Description of Artificial Sequence: Synthetic Antisense oligonucleotide
  source 1..15: mol_type = other DNA
taagttctgtccaag

SEQ ID NO: 16522 - DNA, 16 bp, synthetic construct
  misc_feature 1..16: note = Description of Artificial Sequence: Synthetic Antisense oligonucleotide
  source 1..16: mol_type = other DNA
tcaaggaagatggcat

SEQ ID NO: 16523 - DNA, 15 bp, synthetic construct
  misc_feature 1..15: note = Description of Artificial Sequence: Synthetic Antisense oligonucleotide
  source 1..15: mol_type = other DNA
taagttctgtccaag

SEQ ID NO: 16524 - DNA, 16 bp, synthetic construct
  misc_feature 1..16: note = Description of Artificial Sequence: Synthetic Antisense oligonucleotide
  source 1..16: mol_type = other DNA
tcaaggaagatggcat

SEQ ID NO: 16525 - DNA, 15 bp, synthetic construct
  misc_feature 1..15: note = Description of Artificial Sequence: Synthetic Antisense oligonucleotide
  source 1..15: mol_type = other DNA
taagttctgtccaag

SEQ ID NO: 16526 - DNA, 16 bp, synthetic construct
  misc_feature 1..16: note = Description of Artificial Sequence: Synthetic Antisense oligonucleotide
  source 1..16: mol_type = other DNA
tcaaggaagatggcat

SEQ ID NO: 16527 - DNA, 15 bp, synthetic construct
  misc_feature 1..15: note = Description of Artificial Sequence: Synthetic Antisense oligonucleotide
  source 1..15: mol_type = other DNA
taagttctgtccaag

SEQ ID NO: 16528 - DNA, 16 bp, synthetic construct
  misc_feature 1..16: note = Description of Artificial Sequence: Synthetic Antisense oligonucleotide
  source 1..16: mol_type = other DNA
tcaaggaagatggcat

SEQ ID NO: 16529 - DNA, 15 bp, synthetic construct
  misc_feature 1..15: note = Description of Artificial Sequence: Synthetic Antisense oligonucleotide
  source 1..15: mol_type = other DNA
taagttctgtccaag
